(19) United States
(12) Patent Application Publication
(10) Pub. No.: US 2024/0158773 A1
(43) Pub. Date: May 16, 2024

(54) ENGINEERED BOTULINUM NEUROTOXIN A PROTEASE DOMAIN WITH IMPROVED EFFICACY

(71) Applicant: Children's Medical Center Cprporation, Boston, MA (US)

(72) Inventors: Min Dong, Weatogue, CT (US); Pyung-Gang Lee, Boston, MA (US)

(73) Assignee: Children's Medical Center Cprporation, Boston, MA (US)

(21) Appl. No.: 18/282,215

(22) PCT Filed: Mar. 14, 2022
(86) PCT No.: PCT/US2022/020217

§ 371 Date: Sep. 14, 2023

Related U.S. Application Data
(60) Provisional application No. 63/161,357, filed on Mar. 15, 2021.

(51) Int. Cl. C12N 9/52; A61K 8/66; A61K 38/48

(52) U.S. Cl. CPC C12N 9/52; A61K 8/66; A61K 38/4893; C12Y 304/24069

(57) ABSTRACT

Disclosed herein are modified Clostridial Botulinum neurotoxin (BoNT) polypeptides with a modified protease domains of Clostridial Botulinum serotype A1 or A2. Modifications include substitution amino acid mutations, isolated modified protease domains, chimeric molecules, pharmaceutical compositions, and methods of using the same are also disclosed.

### RELATED APPLICATIONS

[0001] This application claims the benefit under 35 U.S.C. § 119(e) of U.S. provisional application No. 63/161,357, titled “ENGINEERED BOTULINUM NEUROTOXIN A PROTEASE DOMAIN WITH IMPROVED EFFICACY,” filed Mar. 15, 2021, the entire contents of which are incorporated herein by reference.

### FEDERALLY SPONSORED RESEARCH

[0002] This invention was made with government support under R01NS080833 awarded by the National Institutes of Health. The government has certain rights in the invention.

### REFERENCE TO A SEQUENCE LISTING SUBMITTED AS A TEXT FILE

[0003] The instant application contains a Sequence Listing which has been submitted in ASCII format via EFS-Web and is hereby incorporated by reference in its entirety. Said ASCII copy, created on Mar. 14, 2022, is named C123370204WO00-SEQ-ARM and is 1,501,919 bytes in size.

### BACKGROUND

[0004] In recent years, Clostridial Botulinum neurotoxin (BoNT) have been widely used to treat a growing list of medical conditions: local injections of minute amount of toxins can attenuate neuronal activity in targeted regions, which can be beneficial in many medical conditions as well as for cosmetic purposes. To date, BoNT serotype A (BoNT/A) and BoNT serotype B (BoNT/B) are the only two BoNTs that are currently FDA-approved for use in humans. The major limitation is the generation of neutralizing antibodies in patients, which renders future treatment ineffective. Termination of BoNT usage often leaves patients with no other effective ways to treat/relieve their disorders. Adverse effects associated with BoNT use range from transient nonserious events such as ptosis and diplopia to life-threatening events even death.

### SUMMARY

[0005] Botulinum neurotoxins (BoNTs) are a family of bacterial toxins that target and enter nerve terminals and then act as a protease to cleave key proteins required for neurotransmitter release, thus inducing flaccid paralysis of muscles. Members of BoNTs, such as BoNT/A, have been utilized to treat a wide range of medical conditions as well as for cosmetic purposes of reducing wrinkles. A local injection of a tiny amount of BoNT/A can induce relaxation of muscles for 3-6 months in humans. However, an issue with clinical use of BoNT/A is that patients may generate neutralizing antibodies. Because the chance of generating neutralizing antibodies is directly related to injected doses, lowering the toxin therapeutic doses is highly desired, which means the efficacy of individual toxin molecule likely must be enhanced. Here, an approach was developed to enhance BoNT efficacy and therapeutic duration by “de-lysine” the lysine residues on the surface of the BoNT protease domain. Using this approach, protease domain mutants containing substitutions of surface lysine residues into arginine residues were systemically designed and tested in BoNT/A. A set of mutations were identified that significantly enhanced the efficacy than the wild-type protease domain. The enhanced efficacy of mutated BoNTs was validated in the context of full-length BoNT/A on both cultured neurons and in vivo in mouse models. These improved protease domains can be utilized to create a new generation of BoNT/A and other chimeric BoNT molecules for therapeutic uses, providing enhanced therapeutic efficacy, longer therapeutic duration, and lower chances of inducing neutralizing antibodies than currently available BoNTs.

[0006] In some aspects, a modified Clostridial Botulinum neurotoxin (BoNT) polypeptide comprises a modified protease domain of Clostridial Botulinum serotype A1 (BoNT/A1) comprising one or more arginine substitutions at positions corresponding to K11, K41, K212, K272, K289, K291, K299, K318, K335, K337, K340, K343, K356, K375, K381, Y387, M411 and K415 in SEQ ID NO: 1.

[0007] In some embodiments, the modified protease domain comprises one or more arginine substitutions at positions corresponding to K11, K335, K337, K343, K375, and K415 in SEQ ID NO: 1.

[0008] In some embodiments, the modified protease domain comprises one or more arginine substitutions at positions corresponding to K41, K318, and K340 in SEQ ID NO: 1.

[0009] In some embodiments, the modified protease domain comprises one or more arginine substitutions at positions corresponding to K289, K291, K299, and K381 in SEQ ID NO: 1.

[0010] In some embodiments, the modified protease domain comprises one or more arginine substitutions at positions corresponding to K212, K272, and K356 in SEQ ID NO: 1.

[0011] In some embodiments, the modified protease domain comprises one or more arginine substitutions at positions corresponding to K11, K41, K318, K335, K337, K340, K343, K375, and K415 in SEQ ID NO: 1.

[0012] In some embodiments, wherein the modified protease domain comprises one or more arginine substitutions at positions corresponding to K11, K289, K291, K299, K335, K337, K343, K375, K381, and K415 in SEQ ID NO: 1.

[0013] In some embodiments, wherein the modified protease domain comprises arginine substitutions at positions corresponding to K11, K289, K291, K299, K335, K337, K343, K375, K381, and K415 in SEQ ID NO: 1.

[0014] In some embodiments, the modified protease domain further comprises one or more arginine substitutions at positions corresponding to K41, K212, K272, K318, K340, and K356 in SEQ ID NO: 1.

[0015] In some embodiments, the modified protease domain comprises one or more arginine substitutions at positions corresponding to K11, K41, K289, K291, K299, K318, K335, K337, K340, K343, K375, K381, and K415 in SEQ ID NO: 1.

[0016] In some embodiments, wherein the modified protease domain comprises arginine substitutions at positions corresponding to K11, K41, K289, K291, K299, K318, K335, K337, K340, K343, K375, K381 and K415 in SEQ ID NO: 1.

[0017] In some embodiments, wherein the modified protease domain comprises one or more arginine substitutions at positions corresponding to K11, K41, K212, K289, K291, K299, K318, K335, K337, K340, K343, K356, K375, K381, and K415 in SEQ ID NO: 1.

[0018] In some embodiments, the modified protease domain comprises arginine substitutions at positions corresponding to K11, K41, K212, K289, K291, K299, K318, K335, K337, K340, K343, K356, K375, K381, and K415 in SEQ ID NO: 1.

[0019] In some embodiments, wherein the modified protease domain comprises one or more arginine substitutions at positions corresponding to K11, K41, K212, K272, K289, K291, K299, K318, K335, K337, K340, K343, K356, K375, K381, and K415 in SEQ ID NO: 1. In some embodiments, the modified protease domain comprises arginine substitutions at positions corresponding to K11, K41, K212, K272, K289, K291, K299, K318, K335, K337, K340, K343, K356, K375, K381, and K415 in SEQ ID NO: 1.

[0020] In some embodiments, wherein the modified protease domain comprises an arginine substitution of K11R in SEQ ID NO: 1.

[0021] In some embodiments, the modified protease domain comprises an arginine substitution of K41R in SEQ ID NO: 1.

[0022] In some embodiments, the modified protease domain comprises an arginine substitution of K212R in SEQ ID NO: 1.

[0023] In some embodiments, the modified protease domain comprises an arginine substitution of K272R in SEQ ID NO: 1.

[0024] In some embodiments, the modified protease domain comprises an arginine substitution of K289R in SEQ ID NO: 1.

[0025] In some embodiments, the modified protease domain comprises an arginine substitution of K291R in SEQ ID NO: 1.

[0026] In some embodiments, the modified protease domain comprises an arginine substitution of K299R in SEQ ID NO: 1.

[0027] In some embodiments, the modified protease domain comprises an arginine substitution of K318R in SEQ ID NO: 1.

[0028] In some embodiments, the modified protease domain comprises an arginine substitution of K335R in SEQ ID NO: 1.

[0029] In some embodiments, the modified protease domain comprises an arginine substitution of K337R in SEQ ID NO: 1.

[0030] In some embodiments, the modified protease domain comprises an arginine substitution of K340R in SEQ ID NO: 1.

[0031] In some embodiments, the modified protease domain comprises an arginine substitution of K343R in SEQ ID NO: 1.

[0032] In some embodiments, the modified protease domain comprises an arginine substitution of K356R in SEQ ID NO: 1.

[0033] In some embodiments, the modified protease domain comprises an arginine substitution of K375R in SEQ ID NO: 1.

[0034] In some embodiments, the modified protease domain comprises an arginine substitution of K381R in SEQ ID NO: 1.

[0035] In some embodiments, the modified protease domain comprises an arginine substitution of Y387R in SEQ ID NO: 1.

[0036] In some embodiments, the modified protease domain comprises an arginine substitution of M411R in SEQ ID NO: 1.

[0037] In some embodiments, the modified protease domain comprises an arginine substitution of K415R in SEQ ID NO: 1.

[0038] In some embodiments, the modified protease domain comprises an amino acid sequence that is at least 80% identical to the amino acid sequence of SEQ ID NO: 88-120 In some embodiments, the modified protease domain comprises the amino acid sequence of any one of SEQ ID NOs: 88-120.

[0039] In some embodiments, the modified BoNT polypeptide further comprises a translocation domain from BoNT/A1.

[0040] In some embodiments, the modified BoNT polypeptide comprises an amino acid sequence that is at least 80% identical to the amino acid sequence of SEQ ID NO: 45-77. In some embodiments, the modified BoNT polypeptide comprises the amino acid sequence of any one of SEQ ID NOs: 45-77.

[0041] In some embodiments, the modified BoNT polypeptide further comprises a receptor binding domain of BoNT/A1.

[0042] In some embodiments, the modified BoNT polypeptide comprises an amino acid sequence that is at least 80% identical to the amino acid sequence of any one of SEQ ID NOs: 2-34. In some embodiments, the modified BoNT polypeptide comprises the amino acid sequence of any one of SEQ ID NOs: 2-34.

[0043] In some embodiments, the receptor binding domain of BoNT/A1 comprises one or more amino acid substitutions at positions corresponding to 917, 953, 954, 955, 957, 968, 1025, 1026, 1052, 1062, 1063, 1064, 1065, 1066, 1145, 1156, 1232, 1272, 1278, 1288, 1289, 1292, 1294, and 1295 in SEQ ID NO: 1. In some embodiments, the one or more BoNT/A1 amino acid substitutions correspond to one or more of F917R or F917K; F953H or F953Y; N954S; S955K; S957N, S957Q or S957Y; M968I; N1025T; N1026K; N1052K; D1062E; T1063P; H1064R or H1064Q; R1065N; Y1066R or Y1066K; T1145Y; R1156M or R1156I; T1232R or T1232K; E1272G; L1278F, L1278Y or L1278W; D1288E or D1288N; D1289Y; G1292R or G1292K; R1294S or R1294T; and P1295S or P1295T in SEQ ID NO: 1.

[0044] In some embodiments, the receptor binding domain of BoNT/A1 comprises an amino acid substitution at a position corresponding to 1156 or 1232 in SEQ ID NO: 1. In some embodiments, the receptor binding domain comprises an amino acid substitution that corresponds to R1156M or T1232R in SEQ ID NO: 1.

[0045] In some embodiments, the modified BoNT polypeptide comprises an amino acid sequence that is at least 80% identical to the amino acid sequence of any one of SEQ ID NOs: 131-165 fused to any one of SEQ ID NOs: 45-77.

[0046] In some embodiments, the modified BoNT polypeptide comprises an amino acid sequence that is at least 80% identical to the amino acid sequence of SEQ ID No: 177 or SEQ ID NO: 178. In some embodiments, the modified BoNT polypeptide comprises the amino acid sequence of SEQ ID NO: 177 or SEQ ID NO: 178.

[0047] In some embodiments, the modified BoNT polypeptide further comprises a receptor binding domain from BoNT/A2.

[0048] In some embodiments, the receptor binding domain comprises one or more amino acid substitutions at positions corresponding to 915, 923, 1090, 1103, 1117, 1156, 1170, 1227, 1254, 1255, or 1256 in SEQ ID NO: 35. In some embodiments, the receptor binding domain comprises one or more amino acid substitutions correspond to one or more of K915Q, T923K, S1090N, N1103D, F1117Y, E1156M, E1170K, D1227N, L1254Q, Y1255G, or D1256N in SEQ ID NO: 35.

[0049] In some embodiments, the modified BoNT polypeptide comprises an amino acid sequence that is at least 80% identical to the amino acid sequence of SEQ ID NO: 166-176 or 204 fused to any one of SEQ ID NO: 45-77.

[0050] In some embodiments, the modified BoNT polypeptide comprises the amino acid sequence of SEQ ID NO: 166-176 or 204 fused to any one of SEQ ID NO: 45-77.

[0051] In some embodiments, the modified BoNT polypeptide further comprising a receptor binding domain from a second BoNT. In some embodiments, the modified BoNT polypeptide further comprising a receptor binding domain from a second BoNT is of serotype B, C, D, E, F, G, H, or En.

[0052] In some embodiments, the modified BoNT polypeptide comprises an amino acid sequence that is at least 80% identical to the amino acid sequence of any one of SEQ ID NO: 179-186 fused to any one of SEQ ID NO: 45-77.

[0053] In some embodiments, the modified BoNT polypeptide comprises the amino acid sequence of SEQ ID NO: 179-186 fused to any one of SEQ ID NO: 45-77.

[0054] In some embodiments, the modified BoNT polypeptide comprises the amino acid sequence of SEQ ID NO: 203.

[0055] In some embodiments, the modified BoNT polypeptide comprising a modified protease domain of BoNT/A1 and translocation domain of BoNT/A1 further comprising a modified linker region. In some embodiments, the modified linker region comprises a protease cleavage site. In some embodiments, the protease cleavage site comprises the amino acid sequence of any one of SEQ ID NO: 206-212.

[0056] In some aspects, a modified Clostridial Botulinum neurotoxin (BoNT) polypeptide comprises a modified protease domain of Clostridial Botulinum serotype A2 (BoNT/A2) comprising one or more arginine substitutions at positions corresponding to K11, K289, K291, K299, K335, K337, and K343 in SEQ ID NO: 2.

[0057] In some embodiments, the modified protease domain of Clostridial Botulinum serotype A2 (BoNT/A2) comprises arginine substitutions at positions corresponding to K11, K289, K291, K299, K335, K337, and K343 in SEQ ID NO: 2.

[0058] In some embodiments, the modified protease domain of BoNT/A2 comprises an arginine substitution of K11R in SEQ ID NO: 2.

[0059] In some embodiments, the modified protease domain of BoNT/A2 comprises an arginine substitution of K289R in SEQ ID NO: 2.

[0060] In some embodiments, the modified protease domain of BoNT/A2 comprises an arginine substitution of K291R in SEQ ID NO: 2.

[0061] In some embodiments, wherein the modified protease domain of BoNT/A2 comprises an arginine substitution of K299R in SEQ ID NO: 2.

[0062] In some embodiments, wherein the modified protease domain of BoNT/A2 comprises an arginine substitution of K335R in SEQ ID NO: 2.

[0063] In some embodiments, wherein the modified protease domain of BoNT/A2 comprises an arginine substitution of K337R in SEQ ID NO: 2.

[0064] In some embodiments, wherein the modified protease domain of BoNT/A2 comprises an arginine substitution of K343R in SEQ ID NO: 2.

[0065] In some embodiments, the modified protease domain of BoNT/A2 comprises an amino acid sequence that is at least 80% identical to the amino acid sequence of SEQ ID NO: 122-129. In some embodiments, the modified protease binding domain comprises the amino acid sequence of any one of SEQ ID NOs: 122-129.

[0066] In some embodiments, the modified BoNT polypeptide further comprises a translocation domain from BoNT/A2.

[0067] In some embodiments, the modified BoNT polypeptide comprises an amino acid sequence that is at least 80% identical to the amino acid sequence of SEQ ID NO: 79-86. In some embodiments, the modified BoNT polypeptide comprises the amino acid sequence of any one of SEQ ID NOs: 79-86.

[0068] In some embodiments, the modified BoNT polypeptide further comprising a receptor binding domain of BoNT/A1.

[0069] In some embodiments, the modified BoNT polypeptide comprises an amino acid sequence that is at least 80% identical to the amino acid sequence of any one of SEQ ID NOs: 36-43. In some embodiments, the modified BoNT polypeptide comprises the amino acid sequence of any one of SEQ ID NOs: 36-43.

[0070] In some embodiments, the receptor binding domain of BoNT/A1 comprises one or more amino acid substitutions at positions corresponding to 917, 953, 954, 955, 957, 968, 1025, 1026, 1052, 1062, 1063, 1064, 1065, 1066, 1145, 1156, 1232, 1272, 1278, 1288, 1289, 1292, 1294, and 1295 in SEQ ID NO: 1. In some embodiments, the one or more amino acid substitutions in the receptor binding domain of BoNT/A1 correspond to one or more of F917R or F917K; F953H or F953Y; N954S; S955K; S957N, S957Q or S957Y; M968I; N1025T; N1026K; N1052K; D1062E; T1063P; H1064R or H1064Q; R1065N; Y1066R or Y1066K; T1145Y; R1156M or R1156I; T1232R or T1232K; E1272G; L1278F, L1278Y or L1278W; D1288E or D1288N; D1289Y; G1292R or G1292K; R1294S or R1294T; and P1295S or P1295T in SEQ ID NO: 1.

[0071] In some embodiments, the receptor binding domain of BoNT/A1 comprises an amino acid substitution at a position corresponding to 1156 or 1232 in SEQ ID NO: 1. In some embodiments, the amino acid substitution in the receptor binding domain of BoNT/A1 corresponds to R1156M or T1232R in SEQ ID NO: 1.

[0072] In some embodiments, the modified BoNT polypeptide comprises an amino acid sequence that is at least 80% identical to the amino acid sequence of any one of SEQ ID NOs: 131-165 or 205 fused to any one of SEQ ID NOs: 79-86. In some embodiments, the modified BoNT polypeptide comprises an amino acid sequence of any one of SEQ ID NOs: 131-165 or 205 fused to any one of SEQ ID NOs: 79-86.

[0073] In some embodiments, the modified BoNT polypeptide further comprises a receptor binding domain from BoNT/A2.

[0074] In some embodiments, the modified receptor binding domain comprises one or more amino acid substitutions at positions corresponding to 915, 923, 1090, 1103, 1117, 1156, 1170, 1227, 1254, 1255, or 1256 in SEQ ID NO: 35. In some embodiments, the one or more the amino acid substitutions in the modified receptor binding domain correspond to one or more of K915Q, T923K, 51090N, N1103D, F1117Y, E1156M, E1170K, D1227N, L1254Q, Y1255G, or D1256N in SEQ ID NO: 35.

[0075] In some embodiments, the modified BoNT polypeptide comprises an amino acid sequence that is at least 80% identical to the amino acid sequence of SEQ ID NO: 166-176 fused to any one of SEQ ID NO: 79-86. In some embodiments, the modified BoNT polypeptide comprises the amino acid sequence of any one of SEQ ID NO: 166-176 fused to any one of SEQ ID NO: 79-86.

[0076] In some embodiments, the modified BoNT polypeptide further comprises a receptor binding domain from a second BoNT. In some embodiments, the receptor binding domain from a second BoNT is of serotype B, C, D, E, F, G, H, or En.

[0077] In some embodiments, the modified BoNT polypeptide comprises an amino acid sequence that is at least 80% identical to the amino acid sequence of any one of SEQ ID NO: 179-186 fused to any one of SEQ ID NO: 79-86.

[0078] In some embodiments, the modified BoNT polypeptide comprises the amino acid sequence of any one of SEQ ID NO: 179-186 fused to any one of SEQ ID NO: 79-86.

[0079] In some embodiments, the modified BoNT polypeptide comprising a modified protease domain of BoNT/A2 and a translocation domain of BoNT/A2 further comprises a modified linker region. In some embodiments, the modified linker region comprises a protease cleavage site. In some embodiments, the protease cleavage site comprises the amino acid sequence of any one of SEQ ID NO: 206-212.

[0080] In some aspects, a nucleic acid molecule comprises a polynucleotide encoding any one of the modified BoNTs described herein. In some embodiments, a nucleic acid vector comprises the nucleic acid molecules encoding for any one of the BoNTs described herein. In some embodiments, a cell comprises the nucleic acid molecule or nucleic acid vector encoding for any one of the BoNTs described herein. In some embodiments, a cell expresses any one of the modified BoNT polypeptides described herein.

[0081] In some embodiments, a method of producing a modified BoNT polypeptide is performed, the method comprising the steps of culturing the cell comprising a nucleic acid molecule or nucleic acid vector encoding any one of the BoNT polypeptide described herein, wherein the cell expresses any on of the BoNT polypeptide, in conditions wherein the modified BoNT polypeptide is produced. In some embodiments, the method of producing a modified BoNT further comprises recovering the modified BoNT polypeptide from the culture.

[0082] In some aspects, the disclosure provides a pharmaceutical composition comprising any one of the modified BoNT polypeptides described herein. In some embodiments, the pharmaceutical composition comprising any one of the modified BoNT polypeptides described herein further comprises a pharmaceutically acceptable excipient.

[0083] In some embodiments, the disclosure provides a kit comprising a pharmaceutical composition described herein and directions for therapeutic administration of the pharmaceutical composition.

[0084] In some aspects, the disclosure provides methods of treating a condition, the method comprising administering a therapeutically effective amount of any one of the modified BoNTs described herein, or the pharmaceutical composition comprising the modified BoNTs described herein to a subject to treat the condition. In some embodiments, the condition is associated with overactive neurons or glands. In some embodiments, the condition is selected from the group consisting of: spasmodic dysphonia, spasmodic torticollis, laryngeal dystonia, oromandibular dysphonia, lingual dystonia, cervical dystonia, focal hand dystonia, blepharospasm, strabismus, hemifacial spasm, eyelid disorder, cerebral palsy, focal spasticity and other voice disorders, spasmodic colitis, neurogenic bladder, anismus, limb spasticity, tics, tremors, bruxism, anal fissure, achalasia, dysphagia and other muscle tone disorders and other disorders characterized by involuntary movements of muscle groups, lacrimation, hyperhydrosis, excessive salivation, excessive gastrointestinal secretions, secretory disorders, pain from muscle spasms, headache pain, dermatological or aesthetic/cosmetic conditions, obesity/reduced appetite, depression. In some embodiments, the condition is not associated with unwanted neuronal activity. In some embodiments, the condition is selected from the group consisting of: psoriasis, allergy, haemophagocytic lymphohistiocytosis, and alcoholic pancreatic disease. In some embodiments, the administering is via injection to where unwanted neuronal activity is present. In some embodiments, any one of the modified BoNT polypeptides described herein, or the any one of the pharmaceutical compositions described here are used in treating a condition associated with unwanted neuronal activity.

[0085] In some embodiments, any one of the modified BoNT polypeptides described herein, or the any one of the pharmaceutical compositions described here are used in medicine. In some embodiments, any one of the modified BoNT polypeptides described herein, or the any one of the pharmaceutical compositions described here are used cosmetics.

[0086] It should be appreciated that the foregoing concepts, and additional concepts discussed below, may be arranged in any suitable combination, as the present disclosure is not limited in this respect. Further, other advantages and novel features of the present disclosure will become apparent from the following detailed description of various non-limiting embodiments when considered in conjunction with the accompanying figures.

### BRIEF DESCRIPTION OF DRAWINGS

[0087] The accompanying drawings are not intended to be drawn to scale. In the drawings, each identical or nearly identical component that is illustrated in various figures may be represented by a like numeral. For purposes of clarity, not every component may be labeled in every drawing. In the drawings:

[0088] FIGS. 1A-1B show the schematic view of BoNT action and its domains. FIG. 1A shows BoNTs are composed of a light chain and a heavy chain, connected via a disulfide bond. The heavy chain can be further divided into two domains: the translocation domain (H_{N}) and the receptor binding domain (H_{C}). FIG. 1B shows a schematic view of BoNT actions: BoNTs recognize neurons by binding to their specific receptors, enter neurons via receptor-mediated endocytosis, the light chains of BoNTs then translocate across endosomal membranes into the cytosol, where these light chains act as proteases to cleave target host proteins. Panel A is adapted from Arnon, S. et al, JAMA, 285:1059, 2001²⁵.

[0089] FIGS. 2A-2C shows the strategy for selecting amino acid substitutions. FIG. 1A shows crystal structure of LC/A1 complexed with SNAP25 fragment (PDB ID: 1XTG) denoted with all 35 lysines as mutation sites. FIG. 2B shows sequence alignment of the LCs of BoNT/A1-A8 with the selected lysine mutation sites outlined. FIG. 2C shows a list of all 35 lysines in A subtypes and the non-lysine residues in the corresponding sites. The corresponding residues with arginine (or non-K and non-R residues) in any A subtypes are marked with asterisks (or double asterisks).

[0090] FIGS. 3A-3D shows locations and groups lysines selected for arginine substitution, a scheme for BoNT production by Sortase ligation, proper activation of BoNTs, and measured protease activity of BoNTs on SNAP25. FIG. 3A shows crystal structure of BoNT/A1 labeled with 16 non-conserved lysines are shown, and the lysines were divided into three groups to generate five different KR mutants: KR6, KR9, KR10, KR13 and KR16. Group 1 residues are involved in SNAP25 binding, while Group 2 residues are distantly located from SNAP25 binding site. Three Group 3 residues are located between LC and HC. FIG. 3B shows a schematic drawing of sortase ligation: A1-LC-H_{N} has a sortase tag (LPETG) on its C-terminus which can be ligated with N-terminal free glycine of A1-H_{C} by sortase. After ligation, the full-length protein should be activated by thrombin to cleave a linker between LC and H_{N} to obtain its functional activity. FIG. 3C shows SDS-PAGE gel image showing the ligation and activation. The full-length ligated toxins (fl-BoNT/A) can be shown at ˜150 kDa without treatment of 2-mercaptoethanol (2-ME), but separated into LC and H_{C} with 2-ME. All the mutant toxins tested in this study were ligated and analyzed using this method. FIG. 3D shows cultured rat cortical neurons were incubated with ligated full-length toxins for 12 hours. Cleaved and un-cleaved SNAP25 of neuron lysates were detected in an immunoblotting assay. SNAP25 cleavage by full-length BoNT/A1-KR6, KR9 and KR10 was slightly more efficient than WT. KR16 displayed notably enhanced SNAP25 cleavage compared to than WT.

[0091] FIGS. 4A-4E show evaluation of mutant BoNT toxins in vivo in mice using Digit Abduction Score (DAS) assays. The data shows that mutant BoNTs produce higher DAS scores than the wildtype BoNT at the same dosage. FIG. 4A shows a standard scoring for DAS assay. Score 0 means normal, while score 4 represents most severe paralysis. FIG. 4B shows DAS results of five KR mutants: KR6, KR9, KR10, KR13 and KR16 along with WT (control). All of these mutants showed enhanced activity compared to WT. The most enhanced mutant was KR10. KR10 paralysis lasted about twice as long as wildtype WT in the same dose and had a higher overall effect on paralysis than wildtype as measured by DAS. FIG. 4C shows DAS results of six KR11 mutants: KR11-41 (KR10+K41R), KR11-212, KR11-272, KR11-318, KR11-340 and KR11-356 along with KR10 and KR16 (controls). These mutants were evaluated to explore the optimal KR mutant between KR10 and KR16. All the KR11s mutants showed similar activity compared to KR10 and KR16. FIG. 4D shows DAS results of BoNT/A1 WT with three different injection doses: 15, 30 and 75 pg. WT BoNT/A1 injection elicited a dose-dependent response and lasted about a month. FIG. 4E shows DAS results of BoNT/A1 KR10 mutant with three different injection doses: 5, 10 and 25 pg. Based on comparison of FIGS. 4D and 4E, KR10 showed at least three times higher potency and longer duration in a similar dose (30 pg of WT vs. 25 pg of KR10) than WT.

[0092] FIGS. 5A-5B show evaluation of modified BoNTs comprising a KR10 modified protease domain and a modified or chimeric receptor binding domain using in vivo using DAS assays. FIG. 5A shows DAS results of KR10 mutants comprising a H_{C}/A1 WT (control) or a H_{C}/A1 mutant comprising R1156M or T1232R. FIG. 5B shows DAS results of a WT or KR10 LC-Hn boNT/A1 fused to the H_{C} of BoNT/A (30 pg). The KR10 mutant showed higher in vivo potency when it was ligated with another serotype H_{C}, H_{C}/B here.

### DETAILED DESCRIPTION OF CERTAIN EMBODIMENTS

[0093] Botulinum neurotoxins (BoNTs) are a family of bacterial toxins produced by clostridium bacteria, with seven well-established serotypes (BoNT/A-G)^{1,32-33} and two recently discovered BoNT-like toxins types X and EN described in US Patent Application Publications US20190136216 and US20200255481 (both incorporated herein by reference). They are one of the most dangerous potential bio-terrorism agents, classified as a “Category A” select agent by Center for Disease Control (CDC) of United States 31. These toxins are produced as a single polypeptide and can be separated by bacterial or host proteases into a light chain (LC, ˜50 kDa) and a heavy chain (HC, ˜100 kDa). The two chains remain connected via an inter-chain disulfide bond. The HC contains two sub-domains: the N-terminal H_{N} domain that mediates translocation of the LC across endosomal membranes, and the C-terminal H_{C} domain that mediates binding to receptors on neurons. The inter-chain disulfide bond is reduced once the LC translocates into the cytosol³⁴⁻³⁵. Released LC acts as a protease to specifically cleave a set of neuronal proteins: BoNT/A, C, and E cleave at distinct sites on a protein known as SNAP-25; BoNT/B, D, F, and G cleave at different sites on a vesicle protein VAMP; and BoNT/C also cleaves a transmembrane protein syntaxin 1^{1,32-33}. These three proteins form a complex, known as SNARE complex, which is essential for release of neurotransmitters³⁶⁻³⁷. Cleavage of any one of these three SNARE proteins blocks neurotransmitters release from neurons, thus paralyzing muscles. Recently discovered BoNT/X cleaves SNARE proteins like other BoNTs, but also cleaves non-canonical substrates VAMP4, VAMP5 and Ykt6. Recently discovered BoNT/EN cleaves VAMP1/2/3 and several other SNARE proteins including SNAP-25, SNAP-23, syntaxin 1B and syntaxin 4.

[0094] BoNTs are the most potent toxins known and cause the human and animal disease known as botulism³³. The major form of botulism is caused by ingesting food contaminated with BoNTs (food botulism). Other forms also exist such as infant botulism, which is due to colonization of the intestine by toxin-producing bacteria in infants. BoNTs are always produced together with another 150 kDa protein known as NTNHA (non-toxic non-hemagglutinin protein), which forms a pH-dependent complex with BoNTs and protects BoNTs from proteases in the gastrointestinal tract³⁸.

[0095] Because local injections of minute amounts of toxins can attenuate neuronal activity in targeted regions, BoNTs have been used to treat a growing list of medical conditions³⁻⁵, including muscle spasms, chronic pain, overactive bladder problems, as well as for cosmetic applications. The market for BoNTs has already surpassed $3 billion in 2018. Among the seven types of BoNT toxins, BoNT/A and BoNT/B are the two toxins that are currently FDA-approved for use in humans³⁻⁵. BoNT/A is the dominant type used for both medical and cosmetic applications, marketed as Botox from Allergan Inc., Dysport from IPSEN Inc., and Xeomin from Merz Inc. BoNT/B is marketed as Myobloc by USWorld Med.

[0096] As the application of BoNTs grows, limitations and adverse effects have been reported. The major limitation is the generation of neutralizing antibodies in patients, which renders future treatment ineffective⁶. Termination of BoNT usage often leaves patients with no other effective ways to treat or relieve their disorders. The probability of antibody responses is directly related to both toxin doses and the frequency of injection⁶. Therefore, this limitation mainly occurs in treating muscle spasms, which involves high dose of toxins. Consistently, antibody responses have not been observed in cosmetic applications, which use extremely low toxin doses⁶.

[0097] The major adverse effects are also often associated with treating muscle spasms, but not cosmetic applications. This is because the adverse effects are largely due to diffusion of toxins to other regions of the body and the possibility of toxin diffusion is directly related to injected doses. The adverse effects range from transient non-serious events such as ptosis and diplopia to life-threatening events even death^{7,8}. In a petition letter filed in 2008 by Dr. Sidney Wolfe to FDA, a total of 180 serious adverse events, including 16 deaths have been documented. As a result, FDA now requires the “Black box warning” on all BoNT products, highlighting the risk of the spread of toxins, following similar warnings issued by the European Union.

[0098] Because both the generation of neutralizing antibodies and toxin diffusion are directly related to injected doses, lowering toxin doses (while maintaining the same levels of toxin activity) is highly desired, which means the efficacy of individual toxin molecules to induce local muscle paralysis has to be enhanced. Such modified BoNTs with improved local efficacy would also reduce any potential off-target effects due to toxin diffusion to other regions.

[0099] The action of BoNTs has three major steps: (1) receptor binding: these toxins target motor nerve terminals by first binding specifically to their receptors expressed in neurons; (2) translocation: after binding to receptors, BoNTs enter cells via receptor-mediated endocytosis into endosomes, and the low pH conditions within endosomes then induce conformational changes of toxin, resulting in its penetration of endosomal membrane and release of its protease domain into the cytosol of neurons; (3) substrate cleavage: within the cytosol of neurons, the released protease domain of BoNTs then cleave proteins required for synaptic transmission, therefore blocking neurotransmission². Corresponding to these three steps of action, BoNTs are composed of three functional domains²: (1) the C-terminal receptor-binding domain (H_{C}, ˜50 kDa); (2) the membrane translocation domain in the middle (H_{N}, ˜50 kDa); (3) the N-terminal protease domain (also known as light chain, LC, ˜50 kDa). The H_{C} and H_{N} together form the heavy chain (HC, ˜100 kDa).

[0100] Herein an approach was developed to enhance BoNT efficacy and therapeutic duration by “de-lysine” the lysine residues on the surface of the BoNT protease domain. Using this approach, BoNT/A protease domain mutants containing substitutions of primarily surface lysine residues into arginines were systemically designed and tested. Multiple sets of mutations were identified that significantly enhanced BoNT/A efficacy compared to BoNTs with a wild-type protease domain. Mutant BoNT enhanced efficacy was validated in the context of full-length BoNT/A on both cultured neurons and in vivo in mouse models. These improved protease domains can be utilized to create a new generation of BoNT/A and other chimeric BoNT molecules for therapeutic uses, providing enhanced therapeutic efficacy, longer therapeutic duration, and lower chances of inducing neutralizing antibodies than currently available BoNTs.

[0101] Accordingly, some aspects of the present disclosure provide modified Clostridial Botulinum neurotoxins (BoNT) comprising a modified protease domain of Clostridial Botulinum serotype A (BoNT/A). In some embodiments, a BoNT comprising the modified protease domain of a BoNT/A increases catalytic activity of the modified BoNT compared to a BoNT comprising a wildtype BoNT/A protease domain. In some embodiments, a BoNT comprising the modified protease domain of BoNT/A reduces systemic toxicity at a dosage that induces the same degree of local paralysis as a BoNT comprising a wildtype BoNT/A protease domain. In some embodiments, a BoNT comprising the modified protease domain of a BoNT/A increases local paralysis compared to a BoNT comprising a wildtype BoNT/A protease domain.

[0102] As used herein, the term “Clostridial Botulinum neurotoxin (BoNT)” encompasses any polypeptide or fragment from a Botulinum neurotoxin. In some embodiments, the term BoNT refers to a full-length BoNT. In some embodiments, the term BoNT refers to a fragment of the BoNT that can execute the overall cellular mechanism whereby a BoNT enters a neuron and inhibits neurotransmitter release. In some embodiments, the term BoNT simply refers to a fragment of the BoNT, without requiring the fragment to have any specific function or activity. Other terms that may be used throughout the present disclosure for “Clostridial Botulinum neurotoxins” may be BoNTs, Botulinum toxins, or C. Botulium toxins. It is to be understood that these terms are used interchangeably.

[0103] A “modified Clostridial Botulinum neurotoxin (BoNT)” encompasses a BoNT comprising any modifications in the amino acid sequence, e.g., truncation, addition, amino acid substitution, and any combination thereof. For example, a BoNT/A1 comprising amino acid substitution mutations at positions K11 or K41 corresponding to SEQ ID NO: 1 is a modified BoNT. In another example, a fragment or a domain of the full-length BoNT (e.g., the protease domain) is considered a modified BoNT. In some embodiments, a domain of the BoNT may also comprise amino acid substitution mutation(s), (e.g., a protease domain) comprising substitution mutation at positions corresponding to K11R or K41R of the full-length BoNT/A1 (SEQ ID NO: 1).

[0104] As used herein, the term “Clostridial Botulinum neurotoxin (BoNT) protease domain” or “LC” means a BoNT domain that can execute the enzymatic target modification step of the intoxication process. Thus, a BoNT protease domain specifically targets a C. botulinum toxin substrate and encompasses the proteolytic cleavage of a C. botulinum toxin substrate, such as, e.g., SNARE proteins like a SNAP-25 substrate, a VAMP substrate and a Syntaxin substrate. Some aspects of present disclosure relate to modified BoNT protease domains from serotype A (BoNT/A), that enhances the protease activity of the BoNT/A. BoNT/A has eight subtypes, BoNT/A1, BoNT/A2, BoNT/A3, BoNT/A4, BoNT/A5, BoNT/A6, BoNT/A7, and BoNT/A8. Thus, the present disclosure encompasses modified BoNT/A protease domain from all and any of the eight subtypes. It is appreciated that when “BoNT/A” is referred to, it encompasses all the subtypes of BoNT/A. In some embodiments, a “modified BoNT/A protease domain” comprises one or more novel amino acid substitution mutations described in the present disclosure.

[0105] Some aspects of present disclosure relate to modified BoNT protease domains from serotype A1 (BoNT/A1), that enhance the protease activity of BoNT/A1. In some embodiments, a “modified BoNT/A1 protease domain” comprises one or more novel amino acid substitution mutations described in the present disclosure. In some embodiments, the modified protease domain of BoNT/A1 comprises about amino acids 1-441 of SEQ ID NO: 1. It is to be understood that the border of the BoNT/A1 protease binding domain fragment may vary by 1-10 amino acids. For example, the modified BoNT/A1 protease domain that may be used for the chimeric toxin may comprise amino acids 1-431, 1-432, 1-433, 1-434, 1-435, 1-436, 1-437, 1-438, 1-439, 1-440, 1-441, 1-442, 1-443, 1-444, 1-445, 1-446, 1-447, 1-448, 1-449 or 1-450 of SEQ ID NO: 1.

[0106] Some aspects of present disclosure relate to modified BoNT protease domains from serotype A2 (BoNT/A2), that enhances the protease activity of the BoNT/A2. In some embodiments, a “modified BoNT/A2 protease domain” comprises one or more novel amino acid substitution mutations described in the present disclosure. In some embodiments, the modified protease domain of BoNT/A2 comprises about amino acids 1-441 of SEQ ID NO: 2. It is to be understood that the border of the BoNT/A2 protease domain fragment may vary by 1-10 amino acids. For example, the modified BoNT/A2 protease domain that may be used for the chimeric toxin may comprise amino acids 1-431, 1-432, 1-433, 1-434, 1-435, 1-436, 1-437, 1-438, 1-439, 1-440, 1-441, 1-442, 1-443, 1-444, 1-445, 1-446, 1-447, 1-448, 1-449 or 1-450 of SEQ ID NO: 2.

[0107] As used herein, the term “Clostridial Botulinum neurotoxin (BoNT) translocation domain” or “Hn” means a BoNT domain that can execute the translocation step of the intoxication process that mediates BoNT light chain translocation. Thus, an Hn facilitates the movement of a BoNT light chain across a membrane into the cytoplasm of a cell. Non-limiting examples of a Hn include a BoNT/A Hn, a BoNT/B Hn, a BoNT/Cl Hn, a BoNT/D Hn, a BoNT/E Hn, a BoNT/F Hn, a BoNT/G Hn, a BoNT/H Hn, and a BoNT/En Hn.

[0108] As used herein, the term “Clostridial Botulinum neurotoxin (BoNT) receptor-binding domain” is synonymous with “H_{C} domain” and “H_{C}”, and means any naturally occurring BoNT receptor binding domain that can execute the cell binding step of the intoxication process, including, e.g., the binding of the BoNT to a BoNT-specific receptor system located on the plasma membrane surface of a target cell.

[0109] Some aspects of present disclosure relate to modified BoNT receptor binding domains from serotype A1 (BoNT/A1), that enhance the binding of the BoNT/A1 to a cell, e.g., neurons or a BoNT/A1 receptor. Thus, the present disclosure encompasses modified BoNT/A1 receptor binding domain from all and any of the eight subtypes. In some embodiments, a “modified BoNT/A1 receptor binding domain” comprises amino acid substitution mutations described in the present disclosure and in U.S. Application 63/128,758, which is incorporated by reference herein in its entirety. In some embodiments, the receptor binding domain of BoNT/A1 comprises about amino acids 873-1296 of SEQ ID NO: 1. It is to be understood that the border of the BoNT/A1 receptor binding domain fragment may vary by 1-10 amino acids. For example, the BoNT/A1 receptor binding domain that may be used for the chimeric toxin may comprise amino acids 863-1296, 864-1296, 865-1296, 866-1296, 867-1296, 868-1296, 869-1296, 870-1296, 871-1296, 872-1296, 873-1296, 874-1296, 875-1296, 876-1296, 877-1296, 878-1296, 879-1296, 880-1296, 881-1296, 882-1296, 883-1296 of SEQ ID NO: 1.

[0110] Some aspects of present disclosure relate to modified BoNT receptor binding domains from serotype A2 (BoNT/A2), that enhances the binding of the BoNT/A2 to a cell, e.g., neurons or a BoNT/A2 receptor. Thus, the present disclosure encompasses modified BoNT/A2 receptor binding domain from all and any of the eight subtypes. In some embodiments, a “modified BoNT/A2 receptor binding domain” comprises amino acid substitution mutations described in the present disclosure and in U.S. Application 63/128,758, which is incorporated by reference herein in its entirety. In some embodiments, the modified receptor binding domain of BoNT/A2 comprises about amino acids 873-1296 of SEQ ID NO: 2. It is to be understood that the border of the BoNT/A2 receptor binding domain fragment may vary by 1-10 amino acids. For example, the modified BoNT/A2 receptor binding domain that may be used for the chimeric toxin may comprise amino acids 863-1296, 864-1296, 865-1296, 866-1296, 867-1296, 868-1296, 869-1296, 870-1296, 871-1296, 872-1296, 873-1296, 874-1296, 875-1296, 876-1296, 877-1296, 878-1296, 879-1296, 880-1296, 881-1296, 882-1296, 883-1296 of SEQ ID NO: 2.

[0111] In some aspects, the modified BoNT polypeptide is a chimeric toxin, wherein receptor binding and transmembrane domains are from a serotype selected from the group consisting of B, C, D, E, F, G, H or En and combinations thereof and the modified protease domain comprises any one of the BoNT/A1 or BoNT/A2 modified protease domains described herein. In some embodiments the receptor binding and translocation domains may be fused with any one of the modified protease domains of BoNT/A1 or BoNT/A2.

[0112] In some aspects, the modified BoNT polypeptide is a chimeric toxin, wherein receptor binding domain is from a serotype selected from the group consisting of B, C, D, E, F, G, H or En, the transmembrane domain in from any one of the BoNT/A serotypes (e.g. BoNT/A1 or BoNT/A2) and the modified protease domain comprises any one of the BoNT/A1 or BoNT/A2 modified protease domains described herein. In some embodiments, any one of the receptor binding domains may be fused with any one of the modified protease and transmembrane domains of BoNT/A1 or BoNT/A2.

[0113] In some embodiments, the modified BoNT polypeptide is a chimeric toxin, wherein the receptor binding domain comprise the BoNT/B serotype. The receptor binding domain of BoNT/B comprises about amino acids 857-1291 of SEQ ID NO: 139. It is to be understood that the border of the BoNT/B receptor binding domain may vary by 1-10 amino acids. For example, the BoNT/B receptor binding domain that may be used for the chimeric toxin may comprise amino acids 847-1291, 848-1291, 849-1291, 850-1291, 851-1291, 852-1291, 853-1291, 854-1291, 855-1291, 856-1291, 857-1291, 858-1291, 859-1291, 860-1291, 861-1291, 862-1291, 863-1291, 864-1291, 865-1291, 866-1291, or 867-1291 of SEQ ID NO: 139.

[0114] In some embodiments, the modified BoNT polypeptide is a chimeric toxin, wherein receptor binding domain comprise the BoNT/C serotype. The receptor binding domain of BoNT/C comprises about amino acids 870-1291 of SEQ ID NO: 140. It is to be understood that the border of the BoNT/C receptor binding domain may vary by 1-10 amino acids. For example, the BoNT/C receptor binding domain that may be used for the chimeric toxin may comprise amino acids 860-1291, 861-1291, 862-1291, 863-1291, 864-1291, 865-1291, 866-1291, 867-1291, 868-1291, 869-1291, 870-1291, 871-1291, 872-1291, 873-1291, 874-1291, 875-1291, 876-1291, 877-1291, 878-1291, 879-1291, or 880-1291 of SEQ ID NO: 140.

[0115] In some embodiments, the modified BoNT polypeptide is a chimeric toxin, wherein receptor binding domain comprise the BoNT/D serotype. The receptor binding domain of BoNT/D comprises about amino acids 1-862 of SEQ ID NO: 141. It is to be understood that the border of the BoNT/D receptor binding domain may vary by 1-10 amino acids. For example, the BoNT/D receptor binding domain that may be used for the chimeric toxin may comprise amino acids 852-1276, 853-1276, 854-1276, 855-1276, 856-1276, 857-1276, 858-1276, 859-1276, 860-1276, 861-1276, 862-1276, 863-1276, 864-1276, 865-1276, 866-1276, 867-1276, 868-1276, 869-1276, 870-1276, 871-1276, 872-1276 of SEQ ID NO: 141.

[0116] In some embodiments, the modified BoNT polypeptide is a chimeric toxin, wherein receptor binding domain comprise the BoNT/E serotype. The receptor binding domain of BoNT/E comprises about amino acids 844-1252 of SEQ ID NO: 142. It is to be understood that the border of the BoNT/E receptor binding domain may vary by 1-10 amino acids. For example, the BoNT/E receptor binding domain that may be used for the chimeric toxin may comprise amino acids 834-1252, 835-1252, 836-1252, 837-1252, 838-1252, 839-1252, 840-1252, 841-1252, 842-1252, 843-1252, 844-1252, 845-1252, 846-1252, 847-1252, 848-1252, 849-1252, 850-1252, 851-1252, 852-1252, 853-1252, 854-1252 of SEQ ID NO: 142.

[0117] In some embodiments, the modified BoNT polypeptide is a chimeric toxin, wherein receptor binding domain comprise the BoNT/F serotype. The receptor binding domain of BoNT/F comprises about amino acids 863-1278 of SEQ ID NO: 143. It is to be understood that the border of the BoNT/F receptor binding domain may vary by 1-10 amino acids. For example, the BoNT/F receptor binding domain that may be used for the chimeric toxin may comprise amino acids 853-1278, 854-1278, 855-1278, 856-1278, 857-1278, 858-1278, 859-1278, 860-1278, 861-1278, 862-1278, 863-1278, 864-1278, 865-1278, 866-1278, 867-1278, 868-1278, 869-1278, 870-1278, 871-1278, 872-1278, or 873-1278 of SEQ ID NO: 143.

[0118] In some embodiments, the modified BoNT polypeptide is a chimeric toxin, wherein receptor binding domain comprise the BoNT/G serotype. The receptor binding domain of BoNT/G comprises about amino acids 862-1297 of SEQ ID NO: 144. It is to be understood that the border of the BoNT/G receptor binding domain may vary by 1-10 amino acids. For example, the BoNT/G receptor binding domain that may be used for the chimeric toxin may comprise amino acids 852-1297, 853-1297, 854-1297, 855-1297, 856-1297, 857-1297, 858-1297, 859-1297, 860-1297, 861-1297, 862-1297, 863-1297, 864-1297, 865-1297, 866-1297, 867-1297, 868-1297, 869-1297, 870-1297, 871-1297, or 872-1297 of SEQ ID NO: 144.

[0119] In some embodiments, the modified BoNT polypeptide is a chimeric toxin, wherein receptor binding domain comprise the BoNT/H serotype. The receptor binding domain of BoNT/H comprises about amino acids 858-1288 of SEQ ID NO: 145. It is to be understood that the border of the BoNT/H receptor binding domain may vary by 1-10 amino acids. For example, the BoNT/H receptor binding domain that may be used for the chimeric toxin may comprise amino acids 848-1288, 849-1288, 850-1288, 851-1288, 852-1288, 853-1288, 854-1288, 855-1288, 856-1288, 857-1288, 858-1288, 859-1288, 860-1288, 861-1288, 862-1288, 863-1288, 864-1288, 865-1288, 866-1288, 867-1288 or 868-1288 of SEQ ID NO: 145.

[0120] In some embodiments, the modified BoNT polypeptide is a chimeric toxin, wherein receptor binding domain comprise the BoNT/EN serotype as described in U.S. application Ser. No. 16/651,720 (incorporated herein by reference). The receptor binding domain of BoNT/EN comprises about amino acids 874-1279 of SEQ ID NO: 146. It is to be understood that the border of the BoNT/EN receptor binding domain may vary by 1-10 amino acids. For example, the BoNT/EN receptor binding domain that may be used for the chimeric toxin may comprise amino acids 864-1279, 865-1279, 866-1279, 867-1279, 868-1279, 869-1279, 870-1279, 871-1279, 872-1279, 873-1279, 874-1279, 875-1279, 876-1279, 877-1279, 878-1279, 879-1279, 880-1279, 881-1279, 882-1279, 883-1279 or 884-1279 of SEQ ID NO: 146.

[0121] Some aspects of the present disclosure provide modified Clostridial Botulinum neurotoxin (BoNT) polypeptides comprising a modified protease domain of Clostridial Botulinum serotype A1 (BoNT/A1). In some embodiments, the modified protease domain of BoNT/A1 comprises one or more arginine substitutions at positions corresponding to K11, K41, K212, K272, K289, K291, K299, K318, K335, K337, K340, K343, K356, K375, K381, Y387, M411 and K415 in SEQ ID NO: 1.

[0122] In some embodiments, the modified BoNT polypeptide is a modified protease domain of BoNT/A1 described herein. In some embodiments, the modified BoNT polypeptide comprises an amino acid sequence that is at least 70% (e.g., at least 70%, at least 75%, at least 80%, at least 85%, at least 90%, at least 95%, or at least 99%) identical to SEQ ID NO:1, and comprises an arginine substitution corresponding to K11 in SEQ ID NO: 1. In some embodiments, the modified BoNT polypeptide comprises the amino acid sequence of SEQ ID NO: 88. In some embodiments, the modified BoNT polypeptide consists of the amino acid sequence of SEQ ID NO: 88.

[0123] In some embodiments, the modified BoNT polypeptide comprises a modified protease domain of BoNT/A1 and a translocation domain of BoNT/A1. In some embodiments, the modified BoNT polypeptide comprises an amino acid sequence that is at least 70% (e.g., at least 70%, at least 75%, at least 80%, at least 85%, at least 90%, at least 95%, or at least 99%) identical to SEQ ID NO:1, and comprises an arginine substitution corresponding to Kl 1 in SEQ ID NO: 1. In some embodiments, the modified BoNT polypeptide comprises the amino acid sequence of SEQ ID NO: 45. In some embodiments, the modified BoNT polypeptide consists of the amino acid sequence of SEQ ID NO: 45.

[0124] In some embodiments, the modified BoNT polypeptide is a full-length BoNT/A1 polypeptide comprising the modified protease domain of BoNT/A1 described herein. In some embodiments, the modified BoNT polypeptide comprises an amino acid sequence that is at least 70% (e.g., at least 70%, at least 75%, at least 80%, at least 85%, at least 90%, at least 95%, or at least 99%) identical to SEQ ID NO: 1, and comprises an arginine substitution corresponding to Kl 1 in SEQ ID NO: 1. In some embodiments, the modified BoNT polypeptide comprises the amino acid sequence of SEQ ID NO: 2. In some embodiments, the modified BoNT polypeptide consists of the amino acid sequence of SEQ ID NO: 2.

[0125] In some embodiments, the modified BoNT polypeptide comprises a modified protease domain of BoNT/A1, a translocation domain of BoNT/A1, and a modified receptor binding domain of BoNT/A1. In some embodiments, the modified BoNT polypeptide comprises an amino acid sequence that is at least 70% (e.g., at least 70%, at least 75%, at least 80%, at least 85%, at least 90%, at least 95%, or at least 99%) identical to SEQ ID NO: 1, and comprises an arginine substitution corresponding to K11 in SEQ ID NO: 1 and one or more amino acid substitutions in the receptor binding domain at positions corresponding to 917, 953, 954, 955, 957, 968, 1025, 1026, 1052, 1062, 1063, 1064, 1065, 1066, 1145, 1156, 1232, 1272, 1278, 1288, 1289, 1292, 1294, and 1295 in SEQ ID NO: 1. In some embodiments the one or more amino acid substitutions in the receptor binding domain correspond to one or more of F917R or F917K; F953H or F953Y; N954S; S955K; S957N, S957Q or S957Y; M968I; N1025T; N1026K; N1052K; D1062E; T1063P; H1064R or H1064Q; R1065N; Y1066R or Y1066K; T1145Y; R1156M or R1156I; T1232R or T1232K; E1272G; L1278F, L1278Y or L1278W; D1288E or D1288N; D1289Y; G1292R or G1292K; R1294S or R1294T; and P1295S or P1295T in SEQ ID NO: 1. In some embodiments, the receptor binding domain comprises an amino acid substitution at a position corresponding to 1156 or 1232 in SEQ ID NO: 1. In some embodiments, the receptor binding domain comprises an amino acid substitution that corresponds to R1156M or T1232R in SEQ ID NO: 1.

[0126] In some embodiments, the modified BoNT polypeptide comprises a modified protease domain of BoNT/A1, a translocation domain of BoNT/A1, and a modified receptor binding domain of BoNT/A2. In some embodiments, the modified BoNT polypeptide comprises an amino acid sequence that is at least 70% (e.g., at least 70%, at least 75%, at least 80%, at least 85%, at least 90%, at least 95%, or at least 99%) identical to SEQ ID NO: 78 fused to the amino acid sequence of any one of SEQ ID NO: 131-165 or 205, and comprises an arginine substitution corresponding to K11 in SEQ ID NO: 1 and one or more amino acid substitutions in the receptor binding domain at positions corresponding to 915, 923, 1090, 1103, 1117, 1156, 1170, 1227, 1254, 1255, or 1256 in SEQ ID NO: 35. In some embodiments, the modified BoNT polypeptide comprises an amino acid sequence that comprises SEQ ID NO: 45 fused to the amino acid sequence of any one of SEQ ID NO: 131-165 or 205, and one or more amino acid substitutions in the receptor binding domain at positions corresponding to 915, 923, 1090, 1103, 1117, 1156, 1170, 1227, 1254, 1255, or 1256 in SEQ ID NO: 35. In some embodiments the one or more amino acid substitutions in the receptor binding domain correspond to one or more of K915Q, T923K, 51090N, N1103D, F1117Y, E1156M, E1170K, D1227N, L1254Q, Y1255G, or D1256N in SEQ ID NO: 35.

[0127] In some embodiments, the modified BoNT polypeptide is a chimeric BoNT a receptor binding domain from a BoNT of a different serotype (e.g., BoNT/B, C, D, E, F, G, H, or EN) fused to a polypeptide comprising the translocation domain of BoNT/A1 and a modified protease domain of BoNT/A1 comprising an arginine substitution corresponding to K11 in SEQ ID NO: 1. In some embodiments, the modified BoNT polypeptide comprises a polypeptide comprising an amino acid sequence that is at least 70% (e.g., at least 70%, at least 75%, at least 80%, at least 85%, at least 90%, at least 95%, or at least 99%) identical to any one of SEQ ID NOs: 179-186, fused to a polypeptide comprising the translocation domain of BoNT/A1 and a modified protease domain of BoNT/A1 comprising an arginine substitution corresponding to K11 in SEQ ID NO: 1. In some embodiments, the modified BoNT polypeptide comprises a polypeptide comprising an amino acid sequence that is at least 70% (e.g., at least 70%, at least 75%, at least 80%, at least 85%, at least 90%, at least 95%, or at least 99%) identical to any one of SEQ ID NOs: 179-186, fused to a polypeptide comprising an amino acid sequence that is at least 70% (e.g., at least 70%, at least 75%, at least 80%, at least 85%, at least 90%, at least 95%, or at least 99%) identical to SEQ ID NO: 44 and comprises an arginine substitution corresponding to K11 in SEQ ID NO: 1. In some embodiments, the modified BoNT polypeptide comprises a polypeptide comprising the amino acid sequence of any one of SEQ ID NOs: 179-186, fused to a polypeptide comprising the amino acid sequence of SEQ ID NO: 45. In some embodiments, the modified BoNT polypeptide comprises a polypeptide consisting of the amino acid sequence of any one of SEQ ID NOs: 179-186, fused to a polypeptide consisting of the amino acid sequence of SEQ ID NO: 45. In some embodiments, the modified BoNT polypeptide comprises the amino acid sequence of any one of SEQ ID NOs: 187-194 having an arginine corresponding to K11 in SEQ ID NO: 1.

[0128] In some embodiments, the modified BoNT polypeptide is a modified protease domain of BoNT/A1 described herein. In some embodiments, the modified BoNT polypeptide comprises an amino acid sequence that is at least 70% (e.g., at least 70%, at least 75%, at least 80%, at least 85%, at least 90%, at least 95%, or at least 99%) identical to SEQ ID NO:1, and comprises an arginine substitution corresponding to K41 in SEQ ID NO: 1. In some embodiments, the modified BoNT polypeptide comprises the amino acid sequence of SEQ ID NO: 89. In some embodiments, the modified BoNT polypeptide consists of the amino acid sequence of SEQ ID NO: 89.

[0129] In some embodiments, the modified BoNT polypeptide comprises a modified protease domain of BoNT/A1 and a translocation domain of BoNT/A1. In some embodiments, the modified BoNT polypeptide comprises an amino acid sequence that is at least 70% (e.g., at least 70%, at least 75%, at least 80%, at least 85%, at least 90%, at least 95%, or at least 99%) identical to SEQ ID NO:1, and comprises an arginine substitution corresponding to K41 in SEQ ID NO: 1. In some embodiments, the modified BoNT polypeptide comprises the amino acid sequence of SEQ ID NO: 46. In some embodiments, the modified BoNT polypeptide consists of the amino acid sequence of SEQ ID NO: 46.

[0130] In some embodiments, the modified BoNT polypeptide is a full-length BoNT/A1 polypeptide comprising the modified protease domain of BoNT/A1 described herein. In some embodiments, the modified BoNT polypeptide comprises an amino acid sequence that is at least 70% (e.g., at least 70%, at least 75%, at least 80%, at least 85%, at least 90%, at least 95%, or at least 99%) identical to SEQ ID NO: 1, and comprises an arginine substitution corresponding to K41 in SEQ ID NO: 1. In some embodiments, the modified BoNT polypeptide comprises the amino acid sequence of SEQ ID NO: 3. In some embodiments, the modified BoNT polypeptide consists of the amino acid sequence of SEQ ID NO: 3.

[0131] In some embodiments, the modified BoNT polypeptide comprises a modified protease domain of BoNT/A1, a translocation domain of BoNT/A1, and a modified receptor binding domain of BoNT/A1. In some embodiments, the modified BoNT polypeptide comprises an amino acid sequence that is at least 70% (e.g., at least 70%, at least 75%, at least 80%, at least 85%, at least 90%, at least 95%, or at least 99%) identical to SEQ ID NO: 1, and comprises an arginine substitution corresponding to K41 in SEQ ID NO: 1 and one or more amino acid substitutions in the receptor binding domain at positions corresponding to 917, 953, 954, 955, 957, 968, 1025, 1026, 1052, 1062, 1063, 1064, 1065, 1066, 1145, 1156, 1232, 1272, 1278, 1288, 1289, 1292, 1294, and 1295 in SEQ ID NO: 1. In some embodiments the one or more amino acid substitutions in the receptor binding domain correspond to one or more of F917R or F917K; F953H or F953Y; N954S; S955K; S957N, S957Q or S957Y; M968I; N1025T; N1026K; N1052K; D1062E; T1063P; H1064R or H1064Q; R1065N; Y1066R or Y1066K; T1145Y; R1156M or R1156I; T1232R or T1232K; E1272G; L1278F, L1278Y or L1278W; D1288E or D1288N; D1289Y; G1292R or G1292K; R1294S or R1294T; and P1295S or P1295T in SEQ ID NO: 1. In some embodiments, the receptor binding domain comprises an amino acid substitution at a position corresponding to 1156 or 1232 in SEQ ID NO: 1. In some embodiments, the receptor binding domain comprises an amino acid substitution that corresponds to R1156M or T1232R in SEQ ID NO: 1.

[0132] In some embodiments, the modified BoNT polypeptide comprises a modified protease domain of BoNT/A1, a translocation domain of BoNT/A1, and a modified receptor binding domain of BoNT/A2. In some embodiments, the modified BoNT polypeptide comprises an amino acid sequence that is at least 70% (e.g., at least 70%, at least 75%, at least 80%, at least 85%, at least 90%, at least 95%, or at least 99%) identical to SEQ ID NO: 78 fused to the amino acid sequence of any one of SEQ ID NO: 131-165 or 205, and comprises an arginine substitution corresponding to K41 in SEQ ID NO: 1 and one or more amino acid substitutions in the receptor binding domain at positions corresponding to 915, 923, 1090, 1103, 1117, 1156, 1170, 1227, 1254, 1255, or 1256 in SEQ ID NO: 35. In some embodiments, the modified BoNT polypeptide comprises an amino acid sequence that comprises SEQ ID NO: 46 fused to the amino acid sequence of any one of SEQ ID NO: 131-165 or 205, and one or more amino acid substitutions in the receptor binding domain at positions corresponding to 915, 923, 1090, 1103, 1117, 1156, 1170, 1227, 1254, 1255, or 1256 in SEQ ID NO: 35. In some embodiments the one or more amino acid substitutions in the receptor binding domain correspond to one or more of K915Q, T923K, 51090N, N1103D, F1117Y, E1156M, E1170K, D1227N, L1254Q, Y1255G, or D1256N in SEQ ID NO: 35.

[0133] In some embodiments, the modified BoNT polypeptide is a chimeric BoNT a receptor binding domain from a BoNT of a different serotype (e.g., BoNT/B, C, D, E, F, G, H, or EN) fused to a polypeptide comprising the translocation domain of BoNT/A1 and a modified protease domain of BoNT/A1 comprising an arginine substitution corresponding to K41 in SEQ ID NO: 1. In some embodiments, the modified BoNT polypeptide comprises a polypeptide comprising an amino acid sequence that is at least 70% (e.g., at least 70%, at least 75%, at least 80%, at least 85%, at least 90%, at least 95%, or at least 99%) identical to any one of SEQ ID NOs: 179-186, fused to a polypeptide comprising the translocation domain of BoNT/A1 and a modified protease domain of BoNT/A1 comprising an arginine substitution corresponding to K41 in SEQ ID NO: 1. In some embodiments, the modified BoNT polypeptide comprises a polypeptide comprising an amino acid sequence that is at least 70% (e.g., at least 70%, at least 75%, at least 80%, at least 85%, at least 90%, at least 95%, or at least 99%) identical to any one of SEQ ID NOs: 179-186, fused to a polypeptide comprising an amino acid sequence that is at least 70% (e.g., at least 70%, at least 75%, at least 80%, at least 85%, at least 90%, at least 95%, or at least 99%) identical to SEQ ID NO: 44 and comprises an arginine substitution corresponding to K41 in SEQ ID NO: 1. In some embodiments, the modified BoNT polypeptide comprises a polypeptide comprising the amino acid sequence of any one of SEQ ID NOs: 179-186, fused to a polypeptide comprising the amino acid sequence of SEQ ID NO: 46. In some embodiments, the modified BoNT polypeptide comprises a polypeptide consisting of the amino acid sequence of any one of SEQ ID NOs: 179-186, fused to a polypeptide consisting of the amino acid sequence of SEQ ID NO: 46. In some embodiments, the modified BoNT polypeptide comprises the amino acid sequence of any one of SEQ ID NOs: 187-194 having an arginine corresponding to K41 in SEQ ID NO: 1.

[0134] In some embodiments, the modified BoNT polypeptide is a modified protease domain of BoNT/A1 described herein. In some embodiments, the modified BoNT polypeptide comprises an amino acid sequence that is at least 70% (e.g., at least 70%, at least 75%, at least 80%, at least 85%, at least 90%, at least 95%, or at least 99%) identical to SEQ ID NO:1, and comprises an arginine substitution corresponding to K212 in SEQ ID NO: 1. In some embodiments, the modified BoNT polypeptide comprises the amino acid sequence of SEQ ID NO: 90. In some embodiments, the modified BoNT polypeptide consists of the amino acid sequence of SEQ ID NO: 90.

[0135] In some embodiments, the modified BoNT polypeptide comprises a modified protease domain of BoNT/A1 and a translocation domain of BoNT/A1. In some embodiments, the modified BoNT polypeptide comprises an amino acid sequence that is at least 70% (e.g., at least 70%, at least 75%, at least 80%, at least 85%, at least 90%, at least 95%, or at least 99%) identical to SEQ ID NO:1, and comprises an arginine substitution corresponding to K212 in SEQ ID NO: 1. In some embodiments, the modified BoNT polypeptide comprises the amino acid sequence of SEQ ID NO: 47. In some embodiments, the modified BoNT polypeptide consists of the amino acid sequence of SEQ ID NO: 47.

[0136] In some embodiments, the modified BoNT polypeptide is a full-length BoNT/A1 polypeptide comprising the modified protease domain of BoNT/A1 described herein. In some embodiments, the modified BoNT polypeptide comprises an amino acid sequence that is at least 70% (e.g., at least 70%, at least 75%, at least 80%, at least 85%, at least 90%, at least 95%, or at least 99%) identical to SEQ ID NO: 1, and comprises an arginine substitution corresponding to K212 in SEQ ID NO: 1. In some embodiments, the modified BoNT polypeptide comprises the amino acid sequence of SEQ ID NO: 4. In some embodiments, the modified BoNT polypeptide consists of the amino acid sequence of SEQ ID NO: 4.

[0137] In some embodiments, the modified BoNT polypeptide comprises a modified protease domain of BoNT/A1, a translocation domain of BoNT/A1, and a modified receptor binding domain of BoNT/A1. In some embodiments, the modified BoNT polypeptide comprises an amino acid sequence that is at least 70% (e.g., at least 70%, at least 75%, at least 80%, at least 85%, at least 90%, at least 95%, or at least 99%) identical to SEQ ID NO: 1, and comprises an arginine substitution corresponding to K212 in SEQ ID NO: 1 and one or more amino acid substitutions in the receptor binding domain at positions corresponding to 917, 953, 954, 955, 957, 968, 1025, 1026, 1052, 1062, 1063, 1064, 1065, 1066, 1145, 1156, 1232, 1272, 1278, 1288, 1289, 1292, 1294, and 1295 in SEQ ID NO: 1. In some embodiments the one or more amino acid substitutions in the receptor binding domain correspond to one or more of F917R or F917K; F953H or F953Y; N954S; S955K; S957N, S957Q or S957Y; M968I; N1025T; N1026K; N1052K; D1062E; T1063P; H1064R or H1064Q; R1065N; Y1066R or Y1066K; T1145Y; R1156M or R1156I; T1232R or T1232K; E1272G; L1278F, L1278Y or L1278W; D1288E or D1288N; D1289Y; G1292R or G1292K; R1294S or R1294T; and P1295S or P1295T in SEQ ID NO: 1. In some embodiments, the receptor binding domain comprises an amino acid substitution at a position corresponding to 1156 or 1232 in SEQ ID NO: 1. In some embodiments, the receptor binding domain comprises an amino acid substitution that corresponds to R1156M or T1232R in SEQ ID NO: 1.

[0138] In some embodiments, the modified BoNT polypeptide comprises a modified protease domain of BoNT/A1, a translocation domain of BoNT/A1, and a modified receptor binding domain of BoNT/A2. In some embodiments, the modified BoNT polypeptide comprises an amino acid sequence that is at least 70% (e.g., at least 70%, at least 75%, at least 80%, at least 85%, at least 90%, at least 95%, or at least 99%) identical to SEQ ID NO: 78 fused to the amino acid sequence of any one of SEQ ID NO: 131-165 or 205, and comprises an arginine substitution corresponding to K212 in SEQ ID NO: 1 and one or more amino acid substitutions in the receptor binding domain at positions corresponding to 915, 923, 1090, 1103, 1117, 1156, 1170, 1227, 1254, 1255, or 1256 in SEQ ID NO: 35. In some embodiments, the modified BoNT polypeptide comprises an amino acid sequence that comprises SEQ ID NO: 47 fused to the amino acid sequence of any one of SEQ ID NO: 131-165 or 205, and one or more amino acid substitutions in the receptor binding domain at positions corresponding to 915, 923, 1090, 1103, 1117, 1156, 1170, 1227, 1254, 1255, or 1256 in SEQ ID NO: 35. In some embodiments the one or more amino acid substitutions in the receptor binding domain correspond to one or more of K915Q, T923K, 51090N, N1103D, F1117Y, E1156M, E1170K, D1227N, L1254Q, Y1255G, or D1256N in SEQ ID NO: 35.

[0139] In some embodiments, the modified BoNT polypeptide is a chimeric BoNT a receptor binding domain from a BoNT of a different serotype (e.g., BoNT/B, C, D, E, F, G, H, or EN) fused to a polypeptide comprising the translocation domain of BoNT/A1 and a modified protease domain of BoNT/A1 comprising an arginine substitution corresponding to K212 in SEQ ID NO: 1. In some embodiments, the modified BoNT polypeptide comprises a polypeptide comprising an amino acid sequence that is at least 70% (e.g., at least 70%, at least 75%, at least 80%, at least 85%, at least 90%, at least 95%, or at least 99%) identical to any one of SEQ ID NOs: 179-186, fused to a polypeptide comprising the translocation domain of BoNT/A1 and a modified protease domain of BoNT/A1 comprising an arginine substitution corresponding to K212 in SEQ ID NO: 1. In some embodiments, the modified BoNT polypeptide comprises a polypeptide comprising an amino acid sequence that is at least 70% (e.g., at least 70%, at least 75%, at least 80%, at least 85%, at least 90%, at least 95%, or at least 99%) identical to any one of SEQ ID NOs: 179-186, fused to a polypeptide comprising an amino acid sequence that is at least 70% (e.g., at least 70%, at least 75%, at least 80%, at least 85%, at least 90%, at least 95%, or at least 99%) identical to SEQ ID NO: 44 and comprises an arginine substitution corresponding to K212 in SEQ ID NO: 1. In some embodiments, the modified BoNT polypeptide comprises a polypeptide comprising the amino acid sequence of any one of SEQ ID NOs: 179-186, fused to a polypeptide comprising the amino acid sequence of SEQ ID NO: 47. In some embodiments, the modified BoNT polypeptide comprises a polypeptide consisting of the amino acid sequence of any one of SEQ ID NOs: 179-186, fused to a polypeptide consisting of the amino acid sequence of SEQ ID NO: 47. In some embodiments, the modified BoNT polypeptide comprises the amino acid sequence of any one of SEQ ID NOs: 187-194 having an arginine corresponding to K212 in SEQ ID NO: 1.

[0140] In some embodiments, the modified BoNT polypeptide is a modified protease domain of BoNT/A1 described herein. In some embodiments, the modified BoNT polypeptide comprises an amino acid sequence that is at least 70% (e.g., at least 70%, at least 75%, at least 80%, at least 85%, at least 90%, at least 95%, or at least 99%) identical to SEQ ID NO:1, and comprises an arginine substitution corresponding to K272 in SEQ ID NO: 1. In some embodiments, the modified BoNT polypeptide comprises the amino acid sequence of SEQ ID NO: 91. In some embodiments, the modified BoNT polypeptide consists of the amino acid sequence of SEQ ID NO: 91.

[0141] In some embodiments, the modified BoNT polypeptide comprises a modified protease domain of BoNT/A1 and a translocation domain of BoNT/A1. In some embodiments, the modified BoNT polypeptide comprises an amino acid sequence that is at least 70% (e.g., at least 70%, at least 75%, at least 80%, at least 85%, at least 90%, at least 95%, or at least 99%) identical to SEQ ID NO:1, and comprises an arginine substitution corresponding to K272 in SEQ ID NO: 1. In some embodiments, the modified BoNT polypeptide comprises the amino acid sequence of SEQ ID NO: 48. In some embodiments, the modified BoNT polypeptide consists of the amino acid sequence of SEQ ID NO: 48.

[0142] In some embodiments, the modified BoNT polypeptide is a full-length BoNT/A1 polypeptide comprising the modified protease domain of BoNT/A1 described herein. In some embodiments, the modified BoNT polypeptide comprises an amino acid sequence that is at least 70% (e.g., at least 70%, at least 75%, at least 80%, at least 85%, at least 90%, at least 95%, or at least 99%) identical to SEQ ID NO: 1, and comprises an arginine substitution corresponding to K272 in SEQ ID NO: 1. In some embodiments, the modified BoNT polypeptide comprises the amino acid sequence of SEQ ID NO: 5. In some embodiments, the modified BoNT polypeptide consists of the amino acid sequence of SEQ ID NO: 5.

[0143] In some embodiments, the modified BoNT polypeptide comprises a modified protease domain of BoNT/A1, a translocation domain of BoNT/A1, and a modified receptor binding domain of BoNT/A1. In some embodiments, the modified BoNT polypeptide comprises an amino acid sequence that is at least 70% (e.g., at least 70%, at least 75%, at least 80%, at least 85%, at least 90%, at least 95%, or at least 99%) identical to SEQ ID NO: 1, and comprises an arginine substitution corresponding to K272 in SEQ ID NO: 1 and one or more amino acid substitutions in the receptor binding domain at positions corresponding to 917, 953, 954, 955, 957, 968, 1025, 1026, 1052, 1062, 1063, 1064, 1065, 1066, 1145, 1156, 1232, 1272, 1278, 1288, 1289, 1292, 1294, and 1295 in SEQ ID NO: 1. In some embodiments the one or more amino acid substitutions in the receptor binding domain correspond to one or more of F917R or F917K; F953H or F953Y; N954S; S955K; S957N, S957Q or S957Y; M968I; N1025T; N1026K; N1052K; D1062E; T1063P; H1064R or H1064Q; R1065N; Y1066R or Y1066K; T1145Y; R1156M or R1156I; T1232R or T1232K; E1272G; L1278F, L1278Y or L1278W; D1288E or D1288N; D1289Y; G1292R or G1292K; R1294S or R1294T; and P1295S or P1295T in SEQ ID NO: 1. In some embodiments, the receptor binding domain comprises an amino acid substitution at a position corresponding to 1156 or 1232 in SEQ ID NO: 1. In some embodiments, the receptor binding domain comprises an amino acid substitution that corresponds to R1156M or T1232R in SEQ ID NO: 1.

[0144] In some embodiments, the modified BoNT polypeptide comprises a modified protease domain of BoNT/A1, a translocation domain of BoNT/A1, and a modified receptor binding domain of BoNT/A2. In some embodiments, the modified BoNT polypeptide comprises an amino acid sequence that is at least 70% (e.g., at least 70%, at least 75%, at least 80%, at least 85%, at least 90%, at least 95%, or at least 99%) identical to SEQ ID NO: 78 fused to the amino acid sequence of any one of SEQ ID NO: 131-165 or 205, and comprises an arginine substitution corresponding to K272 in SEQ ID NO: 1 and one or more amino acid substitutions in the receptor binding domain at positions corresponding to 915, 923, 1090, 1103, 1117, 1156, 1170, 1227, 1254, 1255, or 1256 in SEQ ID NO: 35. In some embodiments, the modified BoNT polypeptide comprises an amino acid sequence that comprises SEQ ID NO: 48 fused to the amino acid sequence of any one of SEQ ID NO: 131-165 or 205, and one or more amino acid substitutions in the receptor binding domain at positions corresponding to 915, 923, 1090, 1103, 1117, 1156, 1170, 1227, 1254, 1255, or 1256 in SEQ ID NO: 35. In some embodiments the one or more amino acid substitutions in the receptor binding domain correspond to one or more of K915Q, T923K, 51090N, N1103D, F1117Y, E1156M, E1170K, D1227N, L1254Q, Y1255G, or D1256N in SEQ ID NO: 35.

[0145] In some embodiments, the modified BoNT polypeptide is a chimeric BoNT a receptor binding domain from a BoNT of a different serotype (e.g., BoNT/B, C, D, E, F, G, H, or EN) fused to a polypeptide comprising the translocation domain of BoNT/A1 and a modified protease domain of BoNT/A1 comprising an arginine substitution corresponding to K272 in SEQ ID NO: 1. In some embodiments, the modified BoNT polypeptide comprises a polypeptide comprising an amino acid sequence that is at least 70% (e.g., at least 70%, at least 75%, at least 80%, at least 85%, at least 90%, at least 95%, or at least 99%) identical to any one of SEQ ID NOs: 179-186, fused to a polypeptide comprising the translocation domain of BoNT/A1 and a modified protease domain of BoNT/A1 comprising an arginine substitution corresponding to K272 in SEQ ID NO: 1. In some embodiments, the modified BoNT polypeptide comprises a polypeptide comprising an amino acid sequence that is at least 70% (e.g., at least 70%, at least 75%, at least 80%, at least 85%, at least 90%, at least 95%, or at least 99%) identical to any one of SEQ ID NOs: 179-186, fused to a polypeptide comprising an amino acid sequence that is at least 70% (e.g., at least 70%, at least 75%, at least 80%, at least 85%, at least 90%, at least 95%, or at least 99%) identical to SEQ ID NO: 44 and comprises an arginine substitution corresponding to K272 in SEQ ID NO: 1. In some embodiments, the modified BoNT polypeptide comprises a polypeptide comprising the amino acid sequence of any one of SEQ ID NOs: 179-186, fused to a polypeptide comprising the amino acid sequence of SEQ ID NO: 48. In some embodiments, the modified BoNT polypeptide comprises a polypeptide consisting of the amino acid sequence of any one of SEQ ID NOs: 179-186, fused to a polypeptide consisting of the amino acid sequence of SEQ ID NO: 48. In some embodiments, the modified BoNT polypeptide comprises the amino acid sequence of any one of SEQ ID NOs: 187-194 having an arginine corresponding to K272 in SEQ ID NO: 1.

[0146] In some embodiments, the modified BoNT polypeptide is a modified protease domain of BoNT/A1 described herein. In some embodiments, the modified BoNT polypeptide comprises an amino acid sequence that is at least 70% (e.g., at least 70%, at least 75%, at least 80%, at least 85%, at least 90%, at least 95%, or at least 99%) identical to SEQ ID NO:1, and comprises an arginine substitution corresponding to K289 in SEQ ID NO: 1. In some embodiments, the modified BoNT polypeptide comprises the amino acid sequence of SEQ ID NO: 92. In some embodiments, the modified BoNT polypeptide consists of the amino acid sequence of SEQ ID NO: 92.

[0147] In some embodiments, the modified BoNT polypeptide comprises a modified protease domain of BoNT/A1 and a translocation domain of BoNT/A1. In some embodiments, the modified BoNT polypeptide comprises an amino acid sequence that is at least 70% (e.g., at least 70%, at least 75%, at least 80%, at least 85%, at least 90%, at least 95%, or at least 99%) identical to SEQ ID NO:1, and comprises an arginine substitution corresponding to K289 in SEQ ID NO: 1. In some embodiments, the modified BoNT polypeptide comprises the amino acid sequence of SEQ ID NO: 49. In some embodiments, the modified BoNT polypeptide consists of the amino acid sequence of SEQ ID NO: 49.

[0148] In some embodiments, the modified BoNT polypeptide is a full-length BoNT/A1 polypeptide comprising the modified protease domain of BoNT/A1 described herein. In some embodiments, the modified BoNT polypeptide comprises an amino acid sequence that is at least 70% (e.g., at least 70%, at least 75%, at least 80%, at least 85%, at least 90%, at least 95%, or at least 99%) identical to SEQ ID NO: 1, and comprises an arginine substitution corresponding to K289 in SEQ ID NO: 1. In some embodiments, the modified BoNT polypeptide comprises the amino acid sequence of SEQ ID NO: 6. In some embodiments, the modified BoNT polypeptide consists of the amino acid sequence of SEQ ID NO: 6.

[0149] In some embodiments, the modified BoNT polypeptide comprises a modified protease domain of BoNT/A1, a translocation domain of BoNT/A1, and a modified receptor binding domain of BoNT/A1. In some embodiments, the modified BoNT polypeptide comprises an amino acid sequence that is at least 70% (e.g., at least 70%, at least 75%, at least 80%, at least 85%, at least 90%, at least 95%, or at least 99%) identical to SEQ ID NO: 1, and comprises an arginine substitution corresponding to K289 in SEQ ID NO: 1 and one or more amino acid substitutions in the receptor binding domain at positions corresponding to 917, 953, 954, 955, 957, 968, 1025, 1026, 1052, 1062, 1063, 1064, 1065, 1066, 1145, 1156, 1232, 1272, 1278, 1288, 1289, 1292, 1294, and 1295 in SEQ ID NO: 1. In some embodiments the one or more amino acid substitutions in the receptor binding domain correspond to one or more of F917R or F917K; F953H or F953Y; N954S; S955K; S957N, S957Q or S957Y; M968I; N1025T; N1026K; N1052K; D1062E; T1063P; H1064R or H1064Q; R1065N; Y1066R or Y1066K; T1145Y; R1156M or R1156I; T1232R or T1232K; E1272G; L1278F, L1278Y or L1278W; D1288E or D1288N; D1289Y; G1292R or G1292K; R1294S or R1294T; and P1295S or P1295T in SEQ ID NO: 1. In some embodiments, the receptor binding domain comprises an amino acid substitution at a position corresponding to 1156 or 1232 in SEQ ID NO: 1. In some embodiments, the receptor binding domain comprises an amino acid substitution that corresponds to R1156M or T1232R in SEQ ID NO: 1.

[0150] In some embodiments, the modified BoNT polypeptide comprises a modified protease domain of BoNT/A1, a translocation domain of BoNT/A1, and a modified receptor binding domain of BoNT/A2. In some embodiments, the modified BoNT polypeptide comprises an amino acid sequence that is at least 70% (e.g., at least 70%, at least 75%, at least 80%, at least 85%, at least 90%, at least 95%, or at least 99%) identical to SEQ ID NO: 78 fused to the amino acid sequence of any one of SEQ ID NO: 131-165 or 205, and comprises an arginine substitution corresponding to K289 in SEQ ID NO: 1 and one or more amino acid substitutions in the receptor binding domain at positions corresponding to 915, 923, 1090, 1103, 1117, 1156, 1170, 1227, 1254, 1255, or 1256 in SEQ ID NO: 35. In some embodiments, the modified BoNT polypeptide comprises an amino acid sequence that comprises SEQ ID NO: 49 fused to the amino acid sequence of any one of SEQ ID NO: 131-165 or 205, and one or more amino acid substitutions in the receptor binding domain at positions corresponding to 915, 923, 1090, 1103, 1117, 1156, 1170, 1227, 1254, 1255, or 1256 in SEQ ID NO: 35. In some embodiments the one or more amino acid substitutions in the receptor binding domain correspond to one or more of K915Q, T923K, S1090N, N1103D, F1117Y, E1156M, E1170K, D1227N, L1254Q, Y1255G, or D1256N in SEQ ID NO: 35.

[0151] In some embodiments, the modified BoNT polypeptide is a chimeric BoNT a receptor binding domain from a BoNT of a different serotype (e.g., BoNT/B, C, D, E, F, G, H, or EN) fused to a polypeptide comprising the translocation domain of BoNT/A1 and a modified protease domain of BoNT/A1 comprising an arginine substitution corresponding to K289 in SEQ ID NO: 1. In some embodiments, the modified BoNT polypeptide comprises a polypeptide comprising an amino acid sequence that is at least 70% (e.g., at least 70%, at least 75%, at least 80%, at least 85%, at least 90%, at least 95%, or at least 99%) identical to any one of SEQ ID NOs: 179-186, fused to a polypeptide comprising the translocation domain of BoNT/A1 and a modified protease domain of BoNT/A1 comprising an arginine substitution corresponding to K289 in SEQ ID NO: 1. In some embodiments, the modified BoNT polypeptide comprises a polypeptide comprising an amino acid sequence that is at least 70% (e.g., at least 70%, at least 75%, at least 80%, at least 85%, at least 90%, at least 95%, or at least 99%) identical to any one of SEQ ID NOs: 179-186, fused to a polypeptide comprising an amino acid sequence that is at least 70% (e.g., at least 70%, at least 75%, at least 80%, at least 85%, at least 90%, at least 95%, or at least 99%) identical to SEQ ID NO: 44 and comprises an arginine substitution corresponding to K289 in SEQ ID NO: 1. In some embodiments, the modified BoNT polypeptide comprises a polypeptide comprising the amino acid sequence of any one of SEQ ID NOs: 179-186, fused to a polypeptide comprising the amino acid sequence of SEQ ID NO: 49. In some embodiments, the modified BoNT polypeptide comprises a polypeptide consisting of the amino acid sequence of any one of SEQ ID NOs: 179-186, fused to a polypeptide consisting of the amino acid sequence of SEQ ID NO: 49. In some embodiments, the modified BoNT polypeptide comprises the amino acid sequence of any one of SEQ ID NOs: 187-194 having an arginine corresponding to K289 in SEQ ID NO: 1.

[0152] In some embodiments, the modified BoNT polypeptide is a modified protease domain of BoNT/A1 described herein. In some embodiments, the modified BoNT polypeptide comprises an amino acid sequence that is at least 70% (e.g., at least 70%, at least 75%, at least 80%, at least 85%, at least 90%, at least 95%, or at least 99%) identical to SEQ ID NO:1, and comprises an arginine substitution corresponding to K291 in SEQ ID NO: 1. In some embodiments, the modified BoNT polypeptide comprises the amino acid sequence of SEQ ID NO: 93. In some embodiments, the modified BoNT polypeptide consists of the amino acid sequence of SEQ ID NO: 93.

[0153] In some embodiments, the modified BoNT polypeptide comprises a modified protease domain of BoNT/A1 and a translocation domain of BoNT/A1. In some embodiments, the modified BoNT polypeptide comprises an amino acid sequence that is at least 70% (e.g., at least 70%, at least 75%, at least 80%, at least 85%, at least 90%, at least 95%, or at least 99%) identical to SEQ ID NO:1, and comprises an arginine substitution corresponding to K291 in SEQ ID NO: 1. In some embodiments, the modified BoNT polypeptide comprises the amino acid sequence of SEQ ID NO: 50. In some embodiments, the modified BoNT polypeptide consists of the amino acid sequence of SEQ ID NO: 50.

[0154] In some embodiments, the modified BoNT polypeptide is a full-length BoNT/A1 polypeptide comprising the modified protease domain of BoNT/A1 described herein. In some embodiments, the modified BoNT polypeptide comprises an amino acid sequence that is at least 70% (e.g., at least 70%, at least 75%, at least 80%, at least 85%, at least 90%, at least 95%, or at least 99%) identical to SEQ ID NO: 1, and comprises an arginine substitution corresponding to K291 in SEQ ID NO: 1. In some embodiments, the modified BoNT polypeptide comprises the amino acid sequence of SEQ ID NO: 7. In some embodiments, the modified BoNT polypeptide consists of the amino acid sequence of SEQ ID NO: 7.

[0155] In some embodiments, the modified BoNT polypeptide comprises a modified protease domain of BoNT/A1, a translocation domain of BoNT/A1, and a modified receptor binding domain of BoNT/A1. In some embodiments, the modified BoNT polypeptide comprises an amino acid sequence that is at least 70% (e.g., at least 70%, at least 75%, at least 80%, at least 85%, at least 90%, at least 95%, or at least 99%) identical to SEQ ID NO: 1, and comprises an arginine substitution corresponding to K291 in SEQ ID NO: 1 and one or more amino acid substitutions in the receptor binding domain at positions corresponding to 917, 953, 954, 955, 957, 968, 1025, 1026, 1052, 1062, 1063, 1064, 1065, 1066, 1145, 1156, 1232, 1272, 1278, 1288, 1289, 1292, 1294, and 1295 in SEQ ID NO: 1. In some embodiments the one or more amino acid substitutions in the receptor binding domain correspond to one or more of F917R or F917K; F953H or F953Y; N954S; S955K; S957N, S957Q or S957Y; M968I; N1025T; N1026K; N1052K; D1062E; T1063P; H1064R or H1064Q; R1065N; Y1066R or Y1066K; T1145Y; R1156M or R1156I; T1232R or T1232K; E1272G; L1278F, L1278Y or L1278W; D1288E or D1288N; D1289Y; G1292R or G1292K; R1294S or R1294T; and P1295S or P1295T in SEQ ID NO: 1. In some embodiments, the receptor binding domain comprises an amino acid substitution at a position corresponding to 1156 or 1232 in SEQ ID NO: 1. In some embodiments, the receptor binding domain comprises an amino acid substitution that corresponds to R1156M or T1232R in SEQ ID NO: 1.

[0156] In some embodiments, the modified BoNT polypeptide comprises a modified protease domain of BoNT/A1, a translocation domain of BoNT/A1, and a modified receptor binding domain of BoNT/A2. In some embodiments, the modified BoNT polypeptide comprises an amino acid sequence that is at least 70% (e.g., at least 70%, at least 75%, at least 80%, at least 85%, at least 90%, at least 95%, or at least 99%) identical to SEQ ID NO: 78 fused to the amino acid sequence of any one of SEQ ID NO: 131-165 or 205, and comprises an arginine substitution corresponding to K291 in SEQ ID NO: 1 and one or more amino acid substitutions in the receptor binding domain at positions corresponding to 915, 923, 1090, 1103, 1117, 1156, 1170, 1227, 1254, 1255, or 1256 in SEQ ID NO: 35. In some embodiments, the modified BoNT polypeptide comprises an amino acid sequence that comprises SEQ ID NO: 50 fused to the amino acid sequence of any one of SEQ ID NO: 131-165 or 205, and one or more amino acid substitutions in the receptor binding domain at positions corresponding to 915, 923, 1090, 1103, 1117, 1156, 1170, 1227, 1254, 1255, or 1256 in SEQ ID NO: 35. In some embodiments the one or more amino acid substitutions in the receptor binding domain correspond to one or more of K915Q, T923K, S1090N, N1103D, F1117Y, E1156M, E1170K, D1227N, L1254Q, Y1255G, or D1256N in SEQ ID NO: 35.

[0157] In some embodiments, the modified BoNT polypeptide is a chimeric BoNT a receptor binding domain from a BoNT of a different serotype (e.g., BoNT/B, C, D, E, F, G, H, or EN) fused to a polypeptide comprising the translocation domain of BoNT/A1 and a modified protease domain of BoNT/A1 comprising an arginine substitution corresponding to K291 in SEQ ID NO: 1. In some embodiments, the modified BoNT polypeptide comprises a polypeptide comprising an amino acid sequence that is at least 70% (e.g., at least 70%, at least 75%, at least 80%, at least 85%, at least 90%, at least 95%, or at least 99%) identical to any one of SEQ ID NOs: 179-186, fused to a polypeptide comprising the translocation domain of BoNT/A1 and a modified protease domain of BoNT/A1 comprising an arginine substitution corresponding to K291 in SEQ ID NO: 1. In some embodiments, the modified BoNT polypeptide comprises a polypeptide comprising an amino acid sequence that is at least 70% (e.g., at least 70%, at least 75%, at least 80%, at least 85%, at least 90%, at least 95%, or at least 99%) identical to any one of SEQ ID NOs: 179-186, fused to a polypeptide comprising an amino acid sequence that is at least 70% (e.g., at least 70%, at least 75%, at least 80%, at least 85%, at least 90%, at least 95%, or at least 99%) identical to SEQ ID NO: 44 and comprises an arginine substitution corresponding to K291 in SEQ ID NO: 1. In some embodiments, the modified BoNT polypeptide comprises a polypeptide comprising the amino acid sequence of any one of SEQ ID NOs: 179-186, fused to a polypeptide comprising the amino acid sequence of SEQ ID NO: 50. In some embodiments, the modified BoNT polypeptide comprises a polypeptide consisting of the amino acid sequence of any one of SEQ ID NOs: 179-186, fused to a polypeptide consisting of the amino acid sequence of SEQ ID NO: 50. In some embodiments, the modified BoNT polypeptide comprises the amino acid sequence of any one of SEQ ID NOs: 187-194 having an arginine corresponding to K291 in SEQ ID NO: 1.

[0158] In some embodiments, the modified BoNT polypeptide is a modified protease domain of BoNT/A1 described herein. In some embodiments, the modified BoNT polypeptide comprises an amino acid sequence that is at least 70% (e.g., at least 70%, at least 75%, at least 80%, at least 85%, at least 90%, at least 95%, or at least 99%) identical to SEQ ID NO:1, and comprises an arginine substitution corresponding to K299 in SEQ ID NO: 1. In some embodiments, the modified BoNT polypeptide comprises the amino acid sequence of SEQ ID NO: 94. In some embodiments, the modified BoNT polypeptide consists of the amino acid sequence of SEQ ID NO: 94.

[0159] In some embodiments, the modified BoNT polypeptide comprises a modified protease domain of BoNT/A1 and a translocation domain of BoNT/A1. In some embodiments, the modified BoNT polypeptide comprises an amino acid sequence that is at least 70% (e.g., at least 70%, at least 75%, at least 80%, at least 85%, at least 90%, at least 95%, or at least 99%) identical to SEQ ID NO:1, and comprises an arginine substitution corresponding to K299 in SEQ ID NO: 1. In some embodiments, the modified BoNT polypeptide comprises the amino acid sequence of SEQ ID NO: 51. In some embodiments, the modified BoNT polypeptide consists of the amino acid sequence of SEQ ID NO: 51.

[0160] In some embodiments, the modified BoNT polypeptide is a full-length BoNT/A1 polypeptide comprising the modified protease domain of BoNT/A1 described herein. In some embodiments, the modified BoNT polypeptide comprises an amino acid sequence that is at least 70% (e.g., at least 70%, at least 75%, at least 80%, at least 85%, at least 90%, at least 95%, or at least 99%) identical to SEQ ID NO: 1, and comprises an arginine substitution corresponding to K299 in SEQ ID NO: 1. In some embodiments, the modified BoNT polypeptide comprises the amino acid sequence of SEQ ID NO: 8. In some embodiments, the modified BoNT polypeptide consists of the amino acid sequence of SEQ ID NO: 8.

[0161] In some embodiments, the modified BoNT polypeptide comprises a modified protease domain of BoNT/A1, a translocation domain of BoNT/A1, and a modified receptor binding domain of BoNT/A1. In some embodiments, the modified BoNT polypeptide comprises an amino acid sequence that is at least 70% (e.g., at least 70%, at least 75%, at least 80%, at least 85%, at least 90%, at least 95%, or at least 99%) identical to SEQ ID NO: 1, and comprises an arginine substitution corresponding to K299 in SEQ ID NO: 1 and one or more amino acid substitutions in the receptor binding domain at positions corresponding to 917, 953, 954, 955, 957, 968, 1025, 1026, 1052, 1062, 1063, 1064, 1065, 1066, 1145, 1156, 1232, 1272, 1278, 1288, 1289, 1292, 1294, and 1295 in SEQ ID NO: 1. In some embodiments the one or more amino acid substitutions in the receptor binding domain correspond to one or more of F917R or F917K; F953H or F953Y; N954S; S955K; S957N, S957Q or S957Y; M968I; N1025T; N1026K; N1052K; D1062E; T1063P; H1064R or H1064Q; R1065N; Y1066R or Y1066K; T1145Y; R1156M or R1156I; T1232R or T1232K; E1272G; L1278F, L1278Y or L1278W; D1288E or D1288N; D1289Y; G1292R or G1292K; R1294S or R1294T; and P1295S or P1295T in SEQ ID NO: 1. In some embodiments, the receptor binding domain comprises an amino acid substitution at a position corresponding to 1156 or 1232 in SEQ ID NO: 1. In some embodiments, the receptor binding domain comprises an amino acid substitution that corresponds to R1156M or T1232R in SEQ ID NO: 1.

[0162] In some embodiments, the modified BoNT polypeptide comprises a modified protease domain of BoNT/A1, a translocation domain of BoNT/A1, and a modified receptor binding domain of BoNT/A2. In some embodiments, the modified BoNT polypeptide comprises an amino acid sequence that is at least 70% (e.g., at least 70%, at least 75%, at least 80%, at least 85%, at least 90%, at least 95%, or at least 99%) identical to SEQ ID NO: 78 fused to the amino acid sequence of any one of SEQ ID NO: 131-165 or 205, and comprises an arginine substitution corresponding to K299 in SEQ ID NO: 1 and one or more amino acid substitutions in the receptor binding domain at positions corresponding to 915, 923, 1090, 1103, 1117, 1156, 1170, 1227, 1254, 1255, or 1256 in SEQ ID NO: 35. In some embodiments, the modified BoNT polypeptide comprises an amino acid sequence that comprises SEQ ID NO: 51 fused to the amino acid sequence of any one of SEQ ID NO: 131-165 or 205, and one or more amino acid substitutions in the receptor binding domain at positions corresponding to 915, 923, 1090, 1103, 1117, 1156, 1170, 1227, 1254, 1255, or 1256 in SEQ ID NO: 35. In some embodiments the one or more amino acid substitutions in the receptor binding domain correspond to one or more of K915Q, T923K, 51090N, N1103D, F1117Y, E1156M, E1170K, D1227N, L1254Q, Y1255G, or D1256N in SEQ ID NO: 35.

[0163] In some embodiments, the modified BoNT polypeptide is a chimeric BoNT a receptor binding domain from a BoNT of a different serotype (e.g., BoNT/B, C, D, E, F, G, H, or EN) fused to a polypeptide comprising the translocation domain of BoNT/A1 and a modified protease domain of BoNT/A1 comprising an arginine substitution corresponding to K299 in SEQ ID NO: 1. In some embodiments, the modified BoNT polypeptide comprises a polypeptide comprising an amino acid sequence that is at least 70% (e.g., at least 70%, at least 75%, at least 80%, at least 85%, at least 90%, at least 95%, or at least 99%) identical to any one of SEQ ID NOs: 179-186, fused to a polypeptide comprising the translocation domain of BoNT/A1 and a modified protease domain of BoNT/A1 comprising an arginine substitution corresponding to K299 in SEQ ID NO: 1. In some embodiments, the modified BoNT polypeptide comprises a polypeptide comprising an amino acid sequence that is at least 70% (e.g., at least 70%, at least 75%, at least 80%, at least 85%, at least 90%, at least 95%, or at least 99%) identical to any one of SEQ ID NOs: 179-186, fused to a polypeptide comprising an amino acid sequence that is at least 70% (e.g., at least 70%, at least 75%, at least 80%, at least 85%, at least 90%, at least 95%, or at least 99%) identical to SEQ ID NO: 44 and comprises an arginine substitution corresponding to K299 in SEQ ID NO: 1. In some embodiments, the modified BoNT polypeptide comprises a polypeptide comprising the amino acid sequence of any one of SEQ ID NOs: 179-186, fused to a polypeptide comprising the amino acid sequence of SEQ ID NO: 51. In some embodiments, the modified BoNT polypeptide comprises a polypeptide consisting of the amino acid sequence of any one of SEQ ID NOs: 179-186, fused to a polypeptide consisting of the amino acid sequence of SEQ ID NO: 51. In some embodiments, the modified BoNT polypeptide comprises the amino acid sequence of any one of SEQ ID NOs: 187-194 having an arginine corresponding to K299 in SEQ ID NO: 1.

[0164] In some embodiments, the modified BoNT polypeptide is a modified protease domain of BoNT/A1 described herein. In some embodiments, the modified BoNT polypeptide comprises an amino acid sequence that is at least 70% (e.g., at least 70%, at least 75%, at least 80%, at least 85%, at least 90%, at least 95%, or at least 99%) identical to SEQ ID NO:1, and comprises an arginine substitution corresponding to K318 in SEQ ID NO: 1. In some embodiments, the modified BoNT polypeptide comprises the amino acid sequence of SEQ ID NO: 95. In some embodiments, the modified BoNT polypeptide consists of the amino acid sequence of SEQ ID NO: 95.

[0165] In some embodiments, the modified BoNT polypeptide comprises a modified protease domain of BoNT/A1 and a translocation domain of BoNT/A1. In some embodiments, the modified BoNT polypeptide comprises an amino acid sequence that is at least 70% (e.g., at least 70%, at least 75%, at least 80%, at least 85%, at least 90%, at least 95%, or at least 99%) identical to SEQ ID NO:1, and comprises an arginine substitution corresponding to K318 in SEQ ID NO: 1. In some embodiments, the modified BoNT polypeptide comprises the amino acid sequence of SEQ ID NO: 52. In some embodiments, the modified BoNT polypeptide consists of the amino acid sequence of SEQ ID NO: 52.

[0166] In some embodiments, the modified BoNT polypeptide is a full-length BoNT/A1 polypeptide comprising the modified protease domain of BoNT/A1 described herein. In some embodiments, the modified BoNT polypeptide comprises an amino acid sequence that is at least 70% (e.g., at least 70%, at least 75%, at least 80%, at least 85%, at least 90%, at least 95%, or at least 99%) identical to SEQ ID NO: 1, and comprises an arginine substitution corresponding to K318 in SEQ ID NO: 1. In some embodiments, the modified BoNT polypeptide comprises the amino acid sequence of SEQ ID NO: 9. In some embodiments, the modified BoNT polypeptide consists of the amino acid sequence of SEQ ID NO: 9.

[0167] In some embodiments, the modified BoNT polypeptide comprises a modified protease domain of BoNT/A1, a translocation domain of BoNT/A1, and a modified receptor binding domain of BoNT/A1. In some embodiments, the modified BoNT polypeptide comprises an amino acid sequence that is at least 70% (e.g., at least 70%, at least 75%, at least 80%, at least 85%, at least 90%, at least 95%, or at least 99%) identical to SEQ ID NO: 1, and comprises an arginine substitution corresponding to K318 in SEQ ID NO: 1 and one or more amino acid substitutions in the receptor binding domain at positions corresponding to 917, 953, 954, 955, 957, 968, 1025, 1026, 1052, 1062, 1063, 1064, 1065, 1066, 1145, 1156, 1232, 1272, 1278, 1288, 1289, 1292, 1294, and 1295 in SEQ ID NO: 1. In some embodiments the one or more amino acid substitutions in the receptor binding domain correspond to one or more of F917R or F917K; F953H or F953Y; N954S; S955K; S957N, S957Q or S957Y; M968I; N1025T; N1026K; N1052K; D1062E; T1063P; H1064R or H1064Q; R1065N; Y1066R or Y1066K; T1145Y; R1156M or R1156I; T1232R or T1232K; E1272G; L1278F, L1278Y or L1278W; D1288E or D1288N; D1289Y; G1292R or G1292K; R1294S or R1294T; and P1295S or P1295T in SEQ ID NO: 1. In some embodiments, the receptor binding domain comprises an amino acid substitution at a position corresponding to 1156 or 1232 in SEQ ID NO: 1. In some embodiments, the receptor binding domain comprises an amino acid substitution that corresponds to R1156M or T1232R in SEQ ID NO: 1.

[0168] In some embodiments, the modified BoNT polypeptide comprises a modified protease domain of BoNT/A1, a translocation domain of BoNT/A1, and a modified receptor binding domain of BoNT/A2. In some embodiments, the modified BoNT polypeptide comprises an amino acid sequence that is at least 70% (e.g., at least 70%, at least 75%, at least 80%, at least 85%, at least 90%, at least 95%, or at least 99%) identical to SEQ ID NO: 78 fused to the amino acid sequence of any one of SEQ ID NO: 131-165 or 205, and comprises an arginine substitution corresponding to K318 in SEQ ID NO: 1 and one or more amino acid substitutions in the receptor binding domain at positions corresponding to 915, 923, 1090, 1103, 1117, 1156, 1170, 1227, 1254, 1255, or 1256 in SEQ ID NO: 35. In some embodiments, the modified BoNT polypeptide comprises an amino acid sequence that comprises SEQ ID NO: 52 fused to the amino acid sequence of any one of SEQ ID NO: 131-165 or 205, and one or more amino acid substitutions in the receptor binding domain at positions corresponding to 915, 923, 1090, 1103, 1117, 1156, 1170, 1227, 1254, 1255, or 1256 in SEQ ID NO: 35. In some embodiments the one or more amino acid substitutions in the receptor binding domain correspond to one or more of K915Q, T923K, 51090N, N1103D, F1117Y, E1156M, E1170K, D1227N, L1254Q, Y1255G, or D1256N in SEQ ID NO: 35.

[0169] In some embodiments, the modified BoNT polypeptide is a chimeric BoNT a receptor binding domain from a BoNT of a different serotype (e.g., BoNT/B, C, D, E, F, G, H, or EN) fused to a polypeptide comprising the translocation domain of BoNT/A1 and a modified protease domain of BoNT/A1 comprising an arginine substitution corresponding to K318 in SEQ ID NO: 1. In some embodiments, the modified BoNT polypeptide comprises a polypeptide comprising an amino acid sequence that is at least 70% (e.g., at least 70%, at least 75%, at least 80%, at least 85%, at least 90%, at least 95%, or at least 99%) identical to any one of SEQ ID NOs: 179-186, fused to a polypeptide comprising the translocation domain of BoNT/A1 and a modified protease domain of BoNT/A1 comprising an arginine substitution corresponding to K318 in SEQ ID NO: 1. In some embodiments, the modified BoNT polypeptide comprises a polypeptide comprising an amino acid sequence that is at least 70% (e.g., at least 70%, at least 75%, at least 80%, at least 85%, at least 90%, at least 95%, or at least 99%) identical to any one of SEQ ID NOs: 179-186, fused to a polypeptide comprising an amino acid sequence that is at least 70% (e.g., at least 70%, at least 75%, at least 80%, at least 85%, at least 90%, at least 95%, or at least 99%) identical to SEQ ID NO: 44 and comprises an arginine substitution corresponding to K318 in SEQ ID NO: 1. In some embodiments, the modified BoNT polypeptide comprises a polypeptide comprising the amino acid sequence of any one of SEQ ID NOs: 179-186, fused to a polypeptide comprising the amino acid sequence of SEQ ID NO: 52. In some embodiments, the modified BoNT polypeptide comprises a polypeptide consisting of the amino acid sequence of any one of SEQ ID NOs: 179-186, fused to a polypeptide consisting of the amino acid sequence of SEQ ID NO: 52. In some embodiments, the modified BoNT polypeptide comprises the amino acid sequence of any one of SEQ ID NOs: 187-194 having an arginine corresponding to K318 in SEQ ID NO: 1.

[0170] In some embodiments, the modified BoNT polypeptide is a modified protease domain of BoNT/A1 described herein. In some embodiments, the modified BoNT polypeptide comprises an amino acid sequence that is at least 70% (e.g., at least 70%, at least 75%, at least 80%, at least 85%, at least 90%, at least 95%, or at least 99%) identical to SEQ ID NO:1, and comprises an arginine substitution corresponding to K335 in SEQ ID NO: 1. In some embodiments, the modified BoNT polypeptide comprises the amino acid sequence of SEQ ID NO: 96. In some embodiments, the modified BoNT polypeptide consists of the amino acid sequence of SEQ ID NO: 96.

[0171] In some embodiments, the modified BoNT polypeptide comprises a modified protease domain of BoNT/A1 and a translocation domain of BoNT/A1. In some embodiments, the modified BoNT polypeptide comprises an amino acid sequence that is at least 70% (e.g., at least 70%, at least 75%, at least 80%, at least 85%, at least 90%, at least 95%, or at least 99%) identical to SEQ ID NO:1, and comprises an arginine substitution corresponding to K335 in SEQ ID NO: 1. In some embodiments, the modified BoNT polypeptide comprises the amino acid sequence of SEQ ID NO: 53. In some embodiments, the modified BoNT polypeptide consists of the amino acid sequence of SEQ ID NO: 53.

[0172] In some embodiments, the modified BoNT polypeptide is a full-length BoNT/A1 polypeptide comprising the modified protease domain of BoNT/A1 described herein. In some embodiments, the modified BoNT polypeptide comprises an amino acid sequence that is at least 70% (e.g., at least 70%, at least 75%, at least 80%, at least 85%, at least 90%, at least 95%, or at least 99%) identical to SEQ ID NO: 1, and comprises an arginine substitution corresponding to K335 in SEQ ID NO: 1. In some embodiments, the modified BoNT polypeptide comprises the amino acid sequence of SEQ ID NO: 10. In some embodiments, the modified BoNT polypeptide consists of the amino acid sequence of SEQ ID NO: 10.

[0173] In some embodiments, the modified BoNT polypeptide comprises a modified protease domain of BoNT/A1, a translocation domain of BoNT/A1, and a modified receptor binding domain of BoNT/A1. In some embodiments, the modified BoNT polypeptide comprises an amino acid sequence that is at least 70% (e.g., at least 70%, at least 75%, at least 80%, at least 85%, at least 90%, at least 95%, or at least 99%) identical to SEQ ID NO: 1, and comprises an arginine substitution corresponding to K335 in SEQ ID NO: 1 and one or more amino acid substitutions in the receptor binding domain at positions corresponding to 917, 953, 954, 955, 957, 968, 1025, 1026, 1052, 1062, 1063, 1064, 1065, 1066, 1145, 1156, 1232, 1272, 1278, 1288, 1289, 1292, 1294, and 1295 in SEQ ID NO: 1. In some embodiments the one or more amino acid substitutions in the receptor binding domain correspond to one or more of F917R or F917K; F953H or F953Y; N954S; S955K; S957N, S957Q or S957Y; M968I; N1025T; N1026K; N1052K; D1062E; T1063P; H1064R or H1064Q; R1065N; Y1066R or Y1066K; T1145Y; R1156M or R1156I; T1232R or T1232K; E1272G; L1278F, L1278Y or L1278W; D1288E or D1288N; D1289Y; G1292R or G1292K; R1294S or R1294T; and P1295S or P1295T in SEQ ID NO: 1. In some embodiments, the receptor binding domain comprises an amino acid substitution at a position corresponding to 1156 or 1232 in SEQ ID NO: 1. In some embodiments, the receptor binding domain comprises an amino acid substitution that corresponds to R1156M or T1232R in SEQ ID NO: 1.

[0174] In some embodiments, the modified BoNT polypeptide comprises a modified protease domain of BoNT/A1, a translocation domain of BoNT/A1, and a modified receptor binding domain of BoNT/A2. In some embodiments, the modified BoNT polypeptide comprises an amino acid sequence that is at least 70% (e.g., at least 70%, at identical to SEQ ID NO: 78 fused to the amino acid sequence of any one of SEQ ID NO: 131-165 or 205, and comprises an arginine substitution corresponding to K335 in SEQ ID NO: 1 and one or more amino acid substitutions in the receptor binding domain at positions corresponding to 915, 923, 1090, 1103, 1117, 1156, 1170, 1227, 1254, 1255, or 1256 in SEQ ID NO: 35. In some embodiments, the modified BoNT polypeptide comprises an amino acid sequence that comprises SEQ ID NO: 53 fused to the amino acid sequence of any one of SEQ ID NO: 131-165 or 205, and one or more amino acid substitutions in the receptor binding domain at positions corresponding to 915, 923, 1090, 1103, 1117, 1156, 1170, 1227, 1254, 1255, or 1256 in SEQ ID NO: 35. In some embodiments the one or more amino acid substitutions in the receptor binding domain correspond to one or more of K915Q, T923K, 51090N, N1103D, F1117Y, E1156M, E1170K, D1227N, L1254Q, Y1255G, or D1256N in SEQ ID NO: 35.

[0175] In some embodiments, the modified BoNT polypeptide is a chimeric BoNT a receptor binding domain from a BoNT of a different serotype (e.g., BoNT/B, C, D, E, F, G, H, or EN) fused to a polypeptide comprising the translocation domain of BoNT/A1 and a modified protease domain of BoNT/A1 comprising an arginine substitution corresponding to K335 in SEQ ID NO: 1. In some embodiments, the modified BoNT polypeptide comprises a polypeptide comprising an amino acid sequence that is at least 70% (e.g., at least 70%, at least 75%, at least 80%, at least 85%, at least 90%, at least 95%, or at least 99%) identical to any one of SEQ ID NOs: 179-186, fused to a polypeptide comprising the translocation domain of BoNT/A1 and a modified protease domain of BoNT/A1 comprising an arginine substitution corresponding to K335 in SEQ ID NO: 1. In some embodiments, the modified BoNT polypeptide comprises a polypeptide comprising an amino acid sequence that is at least 70% (e.g., at least 70%, at least 75%, at least 80%, at least 85%, at least 90%, at least 95%, or at least 99%) identical to any one of SEQ ID NOs: 179-186, fused to a polypeptide comprising an amino acid sequence that is at least 70% (e.g., at least 70%, at least 75%, at least 80%, at least 85%, at least 90%, at least 95%, or at least 99%) identical to SEQ ID NO: 44 and comprises an arginine substitution corresponding to K335 in SEQ ID NO: 1. In some embodiments, the modified BoNT polypeptide comprises a polypeptide comprising the amino acid sequence of any one of SEQ ID NOs: 179-186, fused to a polypeptide comprising the amino acid sequence of SEQ ID NO: 53. In some embodiments, the modified BoNT polypeptide comprises a polypeptide consisting of the amino acid sequence of any one of SEQ ID NOs: 179-186, fused to a polypeptide consisting of the amino acid sequence of SEQ ID NO: 53. In some embodiments, the modified BoNT polypeptide comprises the amino acid sequence of any one of SEQ ID NOs: 187-194 having an arginine corresponding to K335 in SEQ ID NO: 1.

[0176] In some embodiments, the modified BoNT polypeptide is a modified protease domain of BoNT/A1 described herein. In some embodiments, the modified BoNT polypeptide comprises an amino acid sequence that is at least 70% (e.g., at least 70%, at least 75%, at least 80%, at least 85%, at least 90%, at least 95%, or at least 99%) identical to SEQ ID NO:1, and comprises an arginine substitution corresponding to K337 in SEQ ID NO: 1. In some embodiments, the modified BoNT polypeptide comprises the amino acid sequence of SEQ ID NO: 97. In some embodiments, the modified BoNT polypeptide consists of the amino acid sequence of SEQ ID NO: 97.

[0177] In some embodiments, the modified BoNT polypeptide comprises a modified protease domain of BoNT/A1 and a translocation domain of BoNT/A1. In some embodiments, the modified BoNT polypeptide comprises an amino acid sequence that is at least 70% (e.g., at least 70%, at least 75%, at least 80%, at least 85%, at least 90%, at least 95%, or at least 99%) identical to SEQ ID NO:1, and comprises an arginine substitution corresponding to K337 in SEQ ID NO: 1. In some embodiments, the modified BoNT polypeptide comprises the amino acid sequence of SEQ ID NO: 54. In some embodiments, the modified BoNT polypeptide consists of the amino acid sequence of SEQ ID NO: 54.

[0178] In some embodiments, the modified BoNT polypeptide is a full-length BoNT/A1 polypeptide comprising the modified protease domain of BoNT/A1 described herein. In some embodiments, the modified BoNT polypeptide comprises an amino acid sequence that is at least 70% (e.g., at least 70%, at least 75%, at least 80%, at least 85%, at least 90%, at least 95%, or at least 99%) identical to SEQ ID NO: 1, and comprises an arginine substitution corresponding to K337 in SEQ ID NO: 1. In some embodiments, the modified BoNT polypeptide comprises the amino acid sequence of SEQ ID NO: 11. In some embodiments, the modified BoNT polypeptide consists of the amino acid sequence of SEQ ID NO: 11.

[0179] In some embodiments, the modified BoNT polypeptide comprises a modified protease domain of BoNT/A1, a translocation domain of BoNT/A1, and a modified receptor binding domain of BoNT/A1. In some embodiments, the modified BoNT polypeptide comprises an amino acid sequence that is at least 70% (e.g., at least 70%, at least 75%, at least 80%, at least 85%, at least 90%, at least 95%, or at least 99%) identical to SEQ ID NO: 1, and comprises an arginine substitution corresponding to K337 in SEQ ID NO: 1 and one or more amino acid substitutions in the receptor binding domain at positions corresponding to 917, 953, 954, 955, 957, 968, 1025, 1026, 1052, 1062, 1063, 1064, 1065, 1066, 1145, 1156, 1232, 1272, 1278, 1288, 1289, 1292, 1294, and 1295 in SEQ ID NO: 1. In some embodiments the one or more amino acid substitutions in the receptor binding domain correspond to one or more of F917R or F917K; F953H or F953Y; N954S; S955K; S957N, S957Q or S957Y; M968I; N1025T; N1026K; N1052K; D1062E; T1063P; H1064R or H1064Q; R1065N; Y1066R or Y1066K; T1145Y; R1156M or R1156I; T1232R or T1232K; E1272G; L1278F, L1278Y or L1278W; D1288E or D1288N; D1289Y; G1292R or G1292K; R1294S or R1294T; and P1295S or P1295T in SEQ ID NO: 1. In some embodiments, the receptor binding domain comprises an amino acid substitution at a position corresponding to 1156 or 1232 in SEQ ID NO: 1. In some embodiments, the receptor binding domain comprises an amino acid substitution that corresponds to R1156M or T1232R in SEQ ID NO: 1.

[0180] In some embodiments, the modified BoNT polypeptide comprises a modified protease domain of BoNT/A1, a translocation domain of BoNT/A1, and a modified receptor binding domain of BoNT/A2. In some embodiments, the modified BoNT polypeptide comprises an amino acid sequence that is at least 70% (e.g., at least 70%, at least 75%, at least 80%, at least 85%, at least 90%, at least 95%, or at least 99%) identical to SEQ ID NO: 78 fused to the amino acid sequence of any one of SEQ ID NO: 131-165 or 205, and comprises an arginine substitution corresponding to K337 in SEQ ID NO: 1 and one or more amino acid substitutions in the receptor binding domain at positions corresponding to 915, 923, 1090, 1103, 1117, 1156, 1170, 1227, 1254, 1255, or 1256 in SEQ ID NO: 35. In some embodiments, the modified BoNT polypeptide comprises an amino acid sequence that comprises SEQ ID NO: 54 fused to the amino acid sequence of any one of SEQ ID NO: 131-165 or 205, and one or more amino acid substitutions in the receptor binding domain at positions corresponding to 915, 923, 1090, 1103, 1117, 1156, 1170, 1227, 1254, 1255, or 1256 in SEQ ID NO: 35. In some embodiments the one or more amino acid substitutions in the receptor binding domain correspond to one or more of K915Q, T923K, 51090N, N1103D, F1117Y, E1156M, E1170K, D1227N, L1254Q, Y1255G, or D1256N in SEQ ID NO: 35.

[0181] In some embodiments, the modified BoNT polypeptide is a chimeric BoNT a receptor binding domain from a BoNT of a different serotype (e.g., BoNT/B, C, D, E, F, G, H, or EN) fused to a polypeptide comprising the translocation domain of BoNT/A1 and a modified protease domain of BoNT/A1 comprising an arginine substitution corresponding to K337 in SEQ ID NO: 1. In some embodiments, the modified BoNT polypeptide comprises a polypeptide comprising an amino acid sequence that is at least 70% (e.g., at least 70%, at least 75%, at least 80%, at least 85%, at least 90%, at least 95%, or at least 99%) identical to any one of SEQ ID NOs: 179-186, fused to a polypeptide comprising the translocation domain of BoNT/A1 and a modified protease domain of BoNT/A1 comprising an arginine substitution corresponding to K337 in SEQ ID NO: 1. In some embodiments, the modified BoNT polypeptide comprises a polypeptide comprising an amino acid sequence that is at least 70% (e.g., at least 70%, at least 75%, at least 80%, at least 85%, at least 90%, at least 95%, or at least 99%) identical to any one of SEQ ID NOs: 179-186, fused to a polypeptide comprising an amino acid sequence that is at least 70% (e.g., at least 70%, at least 75%, at least 80%, at least 85%, at least 90%, at least 95%, or at least 99%) identical to SEQ ID NO: 44 and comprises an arginine substitution corresponding to K337 in SEQ ID NO: 1. In some embodiments, the modified BoNT polypeptide comprises a polypeptide comprising the amino acid sequence of any one of SEQ ID NOs: 179-186, fused to a polypeptide comprising the amino acid sequence of SEQ ID NO: 54. In some embodiments, the modified BoNT polypeptide comprises a polypeptide consisting of the amino acid sequence of any one of SEQ ID NOs: 179-186, fused to a polypeptide consisting of the amino acid sequence of SEQ ID NO: 54. In some embodiments, the modified BoNT polypeptide comprises the amino acid sequence of any one of SEQ ID NOs: 187-194 having an arginine corresponding to K337 in SEQ ID NO: 1.

[0182] In some embodiments, the modified BoNT polypeptide is a modified protease domain of BoNT/A1 described herein. In some embodiments, the modified BoNT polypeptide comprises an amino acid sequence that is at least 70% (e.g., at least 70%, at least 75%, at least 80%, at least 85%, at least 90%, at least 95%, or at least 99%) identical to SEQ ID NO:1, and comprises an arginine substitution corresponding to K340 in SEQ ID NO: 1. In some embodiments, the modified BoNT polypeptide comprises the amino acid sequence of SEQ ID NO: 98. In some embodiments, the modified BoNT polypeptide consists of the amino acid sequence of SEQ ID NO: 98.

[0183] In some embodiments, the modified BoNT polypeptide comprises a modified protease domain of BoNT/A1 and a translocation domain of BoNT/A1. In some embodiments, the modified BoNT polypeptide comprises an amino acid sequence that is at least 70% (e.g., at least 70%, at least 75%, at least 80%, at least 85%, at least 90%, at least 95%, or at least 99%) identical to SEQ ID NO:1, and comprises an arginine substitution corresponding to K340 in SEQ ID NO: 1. In some embodiments, the modified BoNT polypeptide comprises the amino acid sequence of SEQ ID NO: 55. In some embodiments, the modified BoNT polypeptide consists of the amino acid sequence of SEQ ID NO: 55.

[0184] In some embodiments, the modified BoNT polypeptide is a full-length BoNT/A1 polypeptide comprising the modified protease domain of BoNT/A1 described herein. In some embodiments, the modified BoNT polypeptide comprises an amino acid sequence that is at least 70% (e.g., at least 70%, at least 75%, at least 80%, at least 85%, at least 90%, at least 95%, or at least 99%) identical to SEQ ID NO: 1, and comprises an arginine substitution corresponding to K340 in SEQ ID NO: 1. In some embodiments, the modified BoNT polypeptide comprises the amino acid sequence of SEQ ID NO: 12. In some embodiments, the modified BoNT polypeptide consists of the amino acid sequence of SEQ ID NO: 12.

[0185] In some embodiments, the modified BoNT polypeptide comprises a modified protease domain of BoNT/A1, a translocation domain of BoNT/A1, and a modified receptor binding domain of BoNT/A1. In some embodiments, the modified BoNT polypeptide comprises an amino acid sequence that is at least 70% (e.g., at least 70%, at least 75%, at least 80%, at least 85%, at least 90%, at least 95%, or at least 99%) identical to SEQ ID NO: 1, and comprises an arginine substitution corresponding to K340 in SEQ ID NO: 1 and one or more amino acid substitutions in the receptor binding domain at positions corresponding to 917, 953, 954, 955, 957, 968, 1025, 1026, 1052, 1062, 1063, 1064, 1065, 1066, 1145, 1156, 1232, 1272, 1278, 1288, 1289, 1292, 1294, and 1295 in SEQ ID NO: 1. In some embodiments the one or more amino acid substitutions in the receptor binding domain correspond to one or more of F917R or F917K; F953H or F953Y; N954S; S955K; S957N, S957Q or S957Y; M968I; N1025T; N1026K; N1052K; D1062E; T1063P; H1064R or H1064Q; R1065N; Y1066R or Y1066K; T1145Y; R1156M or R1156I; T1232R or T1232K; E1272G; L1278F, L1278Y or L1278W; D1288E or D1288N; D1289Y; G1292R or G1292K; R1294S or R1294T; and P1295S or P1295T in SEQ ID NO: 1. In some embodiments, the receptor binding domain comprises an amino acid substitution at a position corresponding to 1156 or 1232 in SEQ ID NO: 1. In some embodiments, the receptor binding domain comprises an amino acid substitution that corresponds to R1156M or T1232R in SEQ ID NO: 1.

[0186] In some embodiments, the modified BoNT polypeptide comprises a modified protease domain of BoNT/A1, a translocation domain of BoNT/A1, and a modified receptor binding domain of BoNT/A2. In some embodiments, the modified BoNT polypeptide comprises an amino acid sequence that is at least 70% (e.g., at least 70%, at least 75%, at least 80%, at least 85%, at least 90%, at least 95%, or at least 99%) identical to SEQ ID NO: 78 fused to the amino acid sequence of any one of SEQ ID NO: 131-165 or 205, and comprises an arginine substitution corresponding to K340 in SEQ ID NO: 1 and one or more amino acid substitutions in the receptor binding domain at positions corresponding to 915, 923, 1090, 1103, 1117, 1156, 1170, 1227, 1254, 1255, or 1256 in SEQ ID NO: 35. In some embodiments, the modified BoNT polypeptide comprises an amino acid sequence that comprises SEQ ID NO: 55 fused to the amino acid sequence of any one of SEQ ID NO: 131-165 or 205, and one or more amino acid substitutions in the receptor binding domain at positions corresponding to 915, 923, 1090, 1103, 1117, 1156, 1170, 1227, 1254, 1255, or 1256 in SEQ ID NO: 35. In some embodiments the one or more amino acid substitutions in the receptor binding domain correspond to one or more of K915Q, T923K, S1090N, N1103D, F1117Y, E1156M, E1170K, D1227N, L1254Q, Y1255G, or D1256N in SEQ ID NO: 35.

[0187] In some embodiments, the modified BoNT polypeptide is a chimeric BoNT a receptor binding domain from a BoNT of a different serotype (e.g., BoNT/B, C, D, E, F, G, H, or EN) fused to a polypeptide comprising the translocation domain of BoNT/A1 and a modified protease domain of BoNT/A1 comprising an arginine substitution corresponding to K340 in SEQ ID NO: 1. In some embodiments, the modified BoNT polypeptide comprises a polypeptide comprising an amino acid sequence that is at least 70% (e.g., at least 70%, at least 75%, at least 80%, at least 85%, at least 90%, at least 95%, or at least 99%) identical to any one of SEQ ID NOs: 179-186, fused to a polypeptide comprising the translocation domain of BoNT/A1 and a modified protease domain of BoNT/A1 comprising an arginine substitution corresponding to K340 in SEQ ID NO: 1. In some embodiments, the modified BoNT polypeptide comprises a polypeptide comprising an amino acid sequence that is at least 70% (e.g., at least 70%, at least 75%, at least 80%, at least 85%, at least 90%, at least 95%, or at least 99%) identical to any one of SEQ ID NOs: 179-186, fused to a polypeptide comprising an amino acid sequence that is at least 70% (e.g., at least 70%, at least 75%, at least 80%, at least 85%, at least 90%, at least 95%, or at least 99%) identical to SEQ ID NO: 44 and comprises an arginine substitution corresponding to K340 in SEQ ID NO: 1. In some embodiments, the modified BoNT polypeptide comprises a polypeptide comprising the amino acid sequence of any one of SEQ ID NOs: 179-186, fused to a polypeptide comprising the amino acid sequence of SEQ ID NO: 55. In some embodiments, the modified BoNT polypeptide comprises a polypeptide consisting of the amino acid sequence of any one of SEQ ID NOs: 179-186, fused to a polypeptide consisting of the amino acid sequence of SEQ ID NO: 55. In some embodiments, the modified BoNT polypeptide comprises the amino acid sequence of any one of SEQ ID NOs: 187-194 having an arginine corresponding to K340 in SEQ ID NO: 1.

[0188] In some embodiments, the modified BoNT polypeptide is a modified protease domain of BoNT/A1 described herein. In some embodiments, the modified BoNT polypeptide comprises an amino acid sequence that is at least 70% (e.g., at least 70%, at least 75%, at least 80%, at least 85%, at least 90%, at least 95%, or at least 99%) identical to SEQ ID NO:1, and comprises an arginine substitution corresponding to K343 in SEQ ID NO: 1. In some embodiments, the modified BoNT polypeptide comprises the amino acid sequence of SEQ ID NO: 99. In some embodiments, the modified BoNT polypeptide consists of the amino acid sequence of SEQ ID NO: 99.

[0189] In some embodiments, the modified BoNT polypeptide comprises a modified protease domain of BoNT/A1 and a translocation domain of BoNT/A1. In some embodiments, the modified BoNT polypeptide comprises an amino acid sequence that is at least 70% (e.g., at least 70%, at least 75%, at least 80%, at least 85%, at least 90%, at least 95%, or at least 99%) identical to SEQ ID NO:1, and comprises an arginine substitution corresponding to K343 in SEQ ID NO: 1. In some embodiments, the modified BoNT polypeptide comprises the amino acid sequence of SEQ ID NO: 56. In some embodiments, the modified BoNT polypeptide consists of the amino acid sequence of SEQ ID NO: 56.

[0190] In some embodiments, the modified BoNT polypeptide is a full-length BoNT/A1 polypeptide comprising the modified protease domain of BoNT/A1 described herein. In some embodiments, the modified BoNT polypeptide comprises an amino acid sequence that is at least 70% (e.g., at least 70%, at least 75%, at least 80%, at least 85%, at least 90%, at least 95%, or at least 99%) identical to SEQ ID NO: 1, and comprises an arginine substitution corresponding to K343 in SEQ ID NO: 1. In some embodiments, the modified BoNT polypeptide comprises the amino acid sequence of SEQ ID NO: 13. In some embodiments, the modified BoNT polypeptide consists of the amino acid sequence of SEQ ID NO: 13.

[0191] In some embodiments, the modified BoNT polypeptide comprises a modified protease domain of BoNT/A1, a translocation domain of BoNT/A1, and a modified receptor binding domain of BoNT/A1. In some embodiments, the modified BoNT polypeptide comprises an amino acid sequence that is at least 70% (e.g., at least 70%, at least 75%, at least 80%, at least 85%, at least 90%, at least 95%, or at least 99%) identical to SEQ ID NO: 1, and comprises an arginine substitution corresponding to K343 in SEQ ID NO: 1 and one or more amino acid substitutions in the receptor binding domain at positions corresponding to 917, 953, 954, 955, 957, 968, 1025, 1026, 1052, 1062, 1063, 1064, 1065, 1066, 1145, 1156, 1232, 1272, 1278, 1288, 1289, 1292, 1294, and 1295 in SEQ ID NO: 1. In some embodiments the one or more amino acid substitutions in the receptor binding domain correspond to one or more of F917R or F917K; F953H or F953Y; N954S; S955K; S957N, S957Q or S957Y; M968I; N1025T; N1026K; N1052K; D1062E; T1063P; H1064R or H1064Q; R1065N; Y1066R or Y1066K; T1145Y; R1156M or R1156I; T1232R or T1232K; E1272G; L1278F, L1278Y or L1278W; D1288E or D1288N; D1289Y; G1292R or G1292K; R1294S or R1294T; and P1295S or P1295T in SEQ ID NO: 1. In some embodiments, the receptor binding domain comprises an amino acid substitution at a position corresponding to 1156 or 1232 in SEQ ID NO: 1. In some embodiments, the receptor binding domain comprises an amino acid substitution that corresponds to R1156M or T1232R in SEQ ID NO: 1.

[0192] In some embodiments, the modified BoNT polypeptide comprises a modified protease domain of BoNT/A1, a translocation domain of BoNT/A1, and a modified receptor binding domain of BoNT/A2. In some embodiments, the modified BoNT polypeptide comprises an amino acid sequence that is at least 70% (e.g., at least 70%, at least 75%, at least 80%, at least 85%, at least 90%, at least 95%, or at least 99%) identical to SEQ ID NO: 78 fused to the amino acid sequence of any one of SEQ ID NO: 131-165 or 205, and comprises an arginine substitution corresponding to K343 in SEQ ID NO: 1 and one or more amino acid substitutions in the receptor binding domain at positions corresponding to 915, 923, 1090, 1103, 1117, 1156, 1170, 1227, 1254, 1255, or 1256 in SEQ ID NO: 35. In some embodiments, the modified BoNT polypeptide comprises an amino acid sequence that comprises SEQ ID NO: 56 fused to the amino acid sequence of any one of SEQ ID NO: 131-165 or 205, and one or more amino acid substitutions in the receptor binding domain at positions corresponding to 915, 923, 1090, 1103, 1117, 1156, 1170, 1227, 1254, 1255, or 1256 in SEQ ID NO: 35. In some embodiments the one or more amino acid substitutions in the receptor binding domain correspond to one or more of K915Q, T923K, 51090N, N1103D, F1117Y, E1156M, E1170K, D1227N, L1254Q, Y1255G, or D1256N in SEQ ID NO: 35.

[0193] In some embodiments, the modified BoNT polypeptide is a chimeric BoNT a receptor binding domain from a BoNT of a different serotype (e.g., BoNT/B, C, D, E, F, G, H, or EN) fused to a polypeptide comprising the translocation domain of BoNT/A1 and a modified protease domain of BoNT/A1 comprising an arginine substitution corresponding to K343 in SEQ ID NO: 1. In some embodiments, the modified BoNT polypeptide comprises a polypeptide comprising an amino acid sequence that is at least 70% (e.g., at least 70%, at least 75%, at least 80%, at least 85%, at least 90%, at least 95%, or at least 99%) identical to any one of SEQ ID NOs: 179-186, fused to a polypeptide comprising the translocation domain of BoNT/A1 and a modified protease domain of BoNT/A1 comprising an arginine substitution corresponding to K343 in SEQ ID NO: 1. In some embodiments, the modified BoNT polypeptide comprises a polypeptide comprising an amino acid sequence that is at least 70% (e.g., at least 70%, at least 75%, at least 80%, at least 85%, at least 90%, at least 95%, or at least 99%) identical to any one of SEQ ID NOs: 179-186, fused to a polypeptide comprising an amino acid sequence that is at least 70% (e.g., at least 70%, at least 75%, at least 80%, at least 85%, at least 90%, at least 95%, or at least 99%) identical to SEQ ID NO: 44 and comprises an arginine substitution corresponding to K343 in SEQ ID NO: 1. In some embodiments, the modified BoNT polypeptide comprises a polypeptide comprising the amino acid sequence of any one of SEQ ID NOs: 179-186, fused to a polypeptide comprising the amino acid sequence of SEQ ID NO: 56. In some embodiments, the modified BoNT polypeptide comprises a polypeptide consisting of the amino acid sequence of any one of SEQ ID NOs: 179-186, fused to a polypeptide consisting of the amino acid sequence of SEQ ID NO: 56. In some embodiments, the modified BoNT polypeptide comprises the amino acid sequence of any one of SEQ ID NOs: 187-194 having an arginine corresponding to K343 in SEQ ID NO: 1.

[0194] In some embodiments, the modified BoNT polypeptide is a modified protease domain of BoNT/A1 described herein. In some embodiments, the modified BoNT polypeptide comprises an amino acid sequence that is at least 70% (e.g., at least 70%, at least 75%, at least 80%, at least 85%, at least 90%, at least 95%, or at least 99%) identical to SEQ ID NO:1, and comprises an arginine substitution corresponding to K356 in SEQ ID NO: 1. In some embodiments, the modified BoNT polypeptide comprises the amino acid sequence of SEQ ID NO: 100. In some embodiments, the modified BoNT polypeptide consists of the amino acid sequence of SEQ ID NO: 100.

[0195] In some embodiments, the modified BoNT polypeptide comprises a modified protease domain of BoNT/A1 and a translocation domain of BoNT/A1. In some embodiments, the modified BoNT polypeptide comprises an amino acid sequence that is at least 70% (e.g., at least 70%, at least 75%, at least 80%, at least 85%, at least 90%, at least 95%, or at least 99%) identical to SEQ ID NO:1, and comprises an arginine substitution corresponding to K356 in SEQ ID NO: 1. In some embodiments, the modified BoNT polypeptide comprises the amino acid sequence of SEQ ID NO: 57. In some embodiments, the modified BoNT polypeptide consists of the amino acid sequence of SEQ ID NO: 57.

[0196] In some embodiments, the modified BoNT polypeptide is a full-length BoNT/A1 polypeptide comprising the modified protease domain of BoNT/A1 described herein. In some embodiments, the modified BoNT polypeptide comprises an amino acid sequence that is at least 70% (e.g., at least 70%, at least 75%, at least 80%, at least 85%, at least 90%, at least 95%, or at least 99%) identical to SEQ ID NO: 1, and comprises an arginine substitution corresponding to K356 in SEQ ID NO: 1. In some embodiments, the modified BoNT polypeptide comprises the amino acid sequence of SEQ ID NO: 14. In some embodiments, the modified BoNT polypeptide consists of the amino acid sequence of SEQ ID NO: 14.

[0197] In some embodiments, the modified BoNT polypeptide comprises a modified protease domain of BoNT/A1, a translocation domain of BoNT/A1, and a modified receptor binding domain of BoNT/A1. In some embodiments, the modified BoNT polypeptide comprises an amino acid sequence that is at least 70% (e.g., at least 70%, at least 75%, at least 80%, at least 85%, at least 90%, at least 95%, or at least 99%) identical to SEQ ID NO: 1, and comprises an arginine substitution corresponding to K356 in SEQ ID NO: 1 and one or more amino acid substitutions in the receptor binding domain at positions corresponding to 917, 953, 954, 955, 957, 968, 1025, 1026, 1052, 1062, 1063, 1064, 1065, 1066, 1145, 1156, 1232, 1272, 1278, 1288, 1289, 1292, 1294, and 1295 in SEQ ID NO: 1. In some embodiments the one or more amino acid substitutions in the receptor binding domain correspond to one or more of F917R or F917K; F953H or F953Y; N954S; S955K; S957N, S957Q or S957Y; M968I; N1025T; N1026K; N1052K; D1062E; T1063P; H1064R or H1064Q; R1065N; Y1066R or Y1066K; T1145Y; R1156M or R1156I; T1232R or T1232K; E1272G; L1278F, L1278Y or L1278W; D1288E or D1288N; D1289Y; G1292R or G1292K; R1294S or R1294T; and P1295S or P1295T in SEQ ID NO: 1. In some embodiments, the receptor binding domain comprises an amino acid substitution at a position corresponding to 1156 or 1232 in SEQ ID NO: 1. In some embodiments, the receptor binding domain comprises an amino acid substitution that corresponds to R1156M or T1232R in SEQ ID NO: 1.

[0198] In some embodiments, the modified BoNT polypeptide comprises a modified protease domain of BoNT/A1, a translocation domain of BoNT/A1, and a modified receptor binding domain of BoNT/A2. In some embodiments, the modified BoNT polypeptide comprises an amino acid sequence that is at least 70% (e.g., at least 70%, at least 75%, at least 80%, at least 85%, at least 90%, at least 95%, or at least 99%) identical to SEQ ID NO: 78 fused to the amino acid sequence of any one of SEQ ID NO: 131-165 or 205, and comprises an arginine substitution corresponding to K356 in SEQ ID NO: 1 and one or more amino acid substitutions in the receptor binding domain at positions corresponding to 915, 923, 1090, 1103, 1117, 1156, 1170, 1227, 1254, 1255, or 1256 in SEQ ID NO: 35. In some embodiments, the modified BoNT polypeptide comprises an amino acid sequence that comprises SEQ ID NO: 57 fused to the amino acid sequence of any one of SEQ ID NO: 131-165 or 205, and one or more amino acid substitutions in the receptor binding domain at positions corresponding to 915, 923, 1090, 1103, 1117, 1156, 1170, 1227, 1254, 1255, or 1256 in SEQ ID NO: 35. In some embodiments the one or more amino acid substitutions in the receptor binding domain correspond to one or more of K915Q, T923K, 51090N, N1103D, F1117Y, E1156M, E1170K, D1227N, L1254Q, Y1255G, or D1256N in SEQ ID NO: 35.

[0199] In some embodiments, the modified BoNT polypeptide is a chimeric BoNT a receptor binding domain from a BoNT of a different serotype (e.g., BoNT/B, C, D, E, F, G, H, or EN) fused to a polypeptide comprising the translocation domain of BoNT/A1 and a modified protease domain of BoNT/A1 comprising an arginine substitution corresponding to K356 in SEQ ID NO: 1. In some embodiments, the modified BoNT polypeptide comprises a polypeptide comprising an amino acid sequence that is at least 70% (e.g., at least 70%, at least 75%, at least 80%, at least 85%, at least 90%, at least 95%, or at least 99%) identical to any one of SEQ ID NOs: 179-186, fused to a polypeptide comprising the translocation domain of BoNT/A1 and a modified protease domain of BoNT/A1 comprising an arginine substitution corresponding to K356 in SEQ ID NO: 1. In some embodiments, the modified BoNT polypeptide comprises a polypeptide comprising an amino acid sequence that is at least 70% (e.g., at least 70%, at least 75%, at least 80%, at least 85%, at least 90%, at least 95%, or at least 99%) identical to any one of SEQ ID NOs: 179-186, fused to a polypeptide comprising an amino acid sequence that is at least 70% (e.g., at least 70%, at least 75%, at least 80%, at least 85%, at least 90%, at least 95%, or at least 99%) identical to SEQ ID NO: 44 and comprises an arginine substitution corresponding to K356 in SEQ ID NO: 1. In some embodiments, the modified BoNT polypeptide comprises a polypeptide comprising the amino acid sequence of any one of SEQ ID NOs: 179-186, fused to a polypeptide comprising the amino acid sequence of SEQ ID NO: 57. In some embodiments, the modified BoNT polypeptide comprises a polypeptide consisting of the amino acid sequence of any one of SEQ ID NOs: 179-186, fused to a polypeptide consisting of the amino acid sequence of SEQ ID NO: 57. In some embodiments, the modified BoNT polypeptide comprises the amino acid sequence of any one of SEQ ID NOs: 187-194 having an arginine corresponding to K356 in SEQ ID NO: 1.

[0200] In some embodiments, the modified BoNT polypeptide is a modified protease domain of BoNT/A1 described herein. In some embodiments, the modified BoNT polypeptide comprises an amino acid sequence that is at least 70% (e.g., at least 70%, at least 75%, at least 80%, at least 85%, at least 90%, at least 95%, or at least 99%) identical to SEQ ID NO:1, and comprises an arginine substitution corresponding to K375 in SEQ ID NO: 1. In some embodiments, the modified BoNT polypeptide comprises the amino acid sequence of SEQ ID NO: 101. In some embodiments, the modified BoNT polypeptide consists of the amino acid sequence of SEQ ID NO: 101.

[0201] In some embodiments, the modified BoNT polypeptide comprises a modified protease domain of BoNT/A1 and a translocation domain of BoNT/A1. In some embodiments, the modified BoNT polypeptide comprises an amino acid sequence that is at least 70% (e.g., at least 70%, at least 75%, at least 80%, at least 85%, at least 90%, at least 95%, or at least 99%) identical to SEQ ID NO:1, and comprises an arginine substitution corresponding to K375 in SEQ ID NO: 1. In some embodiments, the modified BoNT polypeptide comprises the amino acid sequence of SEQ ID NO: 58. In some embodiments, the modified BoNT polypeptide consists of the amino acid sequence of SEQ ID NO: 58.

[0202] In some embodiments, the modified BoNT polypeptide is a full-length BoNT/A1 polypeptide comprising the modified protease domain of BoNT/A1 described herein. In some embodiments, the modified BoNT polypeptide comprises an amino acid sequence that is at least 70% (e.g., at least 70%, at least 75%, at least 80%, at least 85%, at least 90%, at least 95%, or at least 99%) identical to SEQ ID NO: 1, and comprises an arginine substitution corresponding to K375 in SEQ ID NO: 1. In some embodiments, the modified BoNT polypeptide comprises the amino acid sequence of SEQ ID NO: 15. In some embodiments, the modified BoNT polypeptide consists of the amino acid sequence of SEQ ID NO: 15.

[0203] In some embodiments, the modified BoNT polypeptide comprises a modified protease domain of BoNT/A1, a translocation domain of BoNT/A1, and a modified receptor binding domain of BoNT/A1. In some embodiments, the modified BoNT polypeptide comprises an amino acid sequence that is at least 70% (e.g., at least 70%, at least 75%, at least 80%, at least 85%, at least 90%, at least 95%, or at least 99%) identical to SEQ ID NO: 1, and comprises an arginine substitution corresponding to K375 in SEQ ID NO: 1 and one or more amino acid substitutions in the receptor binding domain at positions corresponding to 917, 953, 954, 955, 957, 968, 1025, 1026, 1052, 1062, 1063, 1064, 1065, 1066, 1145, 1156, 1232, 1272, 1278, 1288, 1289, 1292, 1294, and 1295 in SEQ ID NO: 1. In some embodiments the one or more amino acid substitutions in the receptor binding domain correspond to one or more of F917R or F917K; F953H or F953Y; N954S; S955K; S957N, S957Q or S957Y; M968I; N1025T; N1026K; N1052K; D1062E; T1063P; H1064R or H1064Q; R1065N; Y1066R or Y1066K; T1145Y; R1156M or R1156I; T1232R or T1232K; E1272G; L1278F, L1278Y or L1278W; D1288E or D1288N; D1289Y; G1292R or G1292K; R1294S or R1294T; and P1295S or P1295T in SEQ ID NO: 1. In some embodiments, the receptor binding domain comprises an amino acid substitution at a position corresponding to 1156 or 1232 in SEQ ID NO: 1. In some embodiments, the receptor binding domain comprises an amino acid substitution that corresponds to R1156M or T1232R in SEQ ID NO: 1.

[0204] In some embodiments, the modified BoNT polypeptide comprises a modified protease domain of BoNT/A1, a translocation domain of BoNT/A1, and a modified receptor binding domain of BoNT/A2. In some embodiments, the modified BoNT polypeptide comprises an amino acid sequence that is at least 70% (e.g., at least 70%, at least 75%, at least 80%, at least 85%, at least 90%, at least 95%, or at least 99%) identical to SEQ ID NO: 78 fused to the amino acid sequence of any one of SEQ ID NO: 131-165 or 205, and comprises an arginine substitution corresponding to K375 in SEQ ID NO: 1 and one or more amino acid substitutions in the receptor binding domain at positions corresponding to 915, 923, 1090, 1103, 1117, 1156, 1170, 1227, 1254, 1255, or 1256 in SEQ ID NO: 35. In some embodiments, the modified BoNT polypeptide comprises an amino acid sequence that comprises SEQ ID NO: 58 fused to the amino acid sequence of any one of SEQ ID NO: 131-165 or 205, and one or more amino acid substitutions in the receptor binding domain at positions corresponding to 915, 923, 1090, 1103, 1117, 1156, 1170, 1227, 1254, 1255, or 1256 in SEQ ID NO: 35. In some embodiments the one or more amino acid substitutions in the receptor binding domain correspond to one or more of K915Q, T923K, 51090N, N1103D, F1117Y, E1156M, E1170K, D1227N, L1254Q, Y1255G, or D1256N in SEQ ID NO: 35.

[0205] In some embodiments, the modified BoNT polypeptide is a chimeric BoNT a receptor binding domain from a BoNT of a different serotype (e.g., BoNT/B, C, D, E, F, G, H, or EN) fused to a polypeptide comprising the translocation domain of BoNT/A1 and a modified protease domain of BoNT/A1 comprising an arginine substitution corresponding to K375 in SEQ ID NO: 1. In some embodiments, the modified BoNT polypeptide comprises a polypeptide comprising an amino acid sequence that is at least 70% (e.g., at least 70%, at least 75%, at least 80%, at least 85%, at least 90%, at least 95%, or at least 99%) identical to any one of SEQ ID NOs: 179-186, fused to a polypeptide comprising the translocation domain of BoNT/A1 and a modified protease domain of BoNT/A1 comprising an arginine substitution corresponding to K375 in SEQ ID NO: 1. In some embodiments, the modified BoNT polypeptide comprises a polypeptide comprising an amino acid sequence that is at least 70% (e.g., at least 70%, at least 75%, at least 80%, at least 85%, at least 90%, at least 95%, or at least 99%) identical to any one of SEQ ID NOs: 179-186, fused to a polypeptide comprising an amino acid sequence that is at least 70% (e.g., at least 70%, at least 75%, at least 80%, at least 85%, at least 90%, at least 95%, or at least 99%) identical to SEQ ID NO: 44 and comprises an arginine substitution corresponding to K375 in SEQ ID NO: 1. In some embodiments, the modified BoNT polypeptide comprises a polypeptide comprising the amino acid sequence of any one of SEQ ID NOs: 179-186, fused to a polypeptide comprising the amino acid sequence of SEQ ID NO: 58. In some embodiments, the modified BoNT polypeptide comprises a polypeptide consisting of the amino acid sequence of any one of SEQ ID NOs: 179-186, fused to a polypeptide consisting of the amino acid sequence of SEQ ID NO: 58. In some embodiments, the modified BoNT polypeptide comprises the amino acid sequence of any one of SEQ ID NOs: 187-194 having an arginine corresponding to K375 in SEQ ID NO: 1.

[0206] In some embodiments, the modified BoNT polypeptide is a modified protease domain of BoNT/A1 described herein. In some embodiments, the modified BoNT polypeptide comprises an amino acid sequence that is at least 70% (e.g., at least 70%, at least 75%, at least 80%, at least 85%, at least 90%, at least 95%, or at least 99%) identical to SEQ ID NO:1, and comprises an arginine substitution corresponding to K381 in SEQ ID NO: 1. In some embodiments, the modified BoNT polypeptide comprises the amino acid sequence of SEQ ID NO: 102. In some embodiments, the modified BoNT polypeptide consists of the amino acid sequence of SEQ ID NO: 102.

[0207] In some embodiments, the modified BoNT polypeptide comprises a modified protease domain of BoNT/A1 and a translocation domain of BoNT/A1. In some embodiments, the modified BoNT polypeptide comprises an amino acid sequence that is at least 70% (e.g., at least 70%, at least 75%, at least 80%, at least 85%, at least 90%, at least 95%, or at least 99%) identical to SEQ ID NO:1, and comprises an arginine substitution corresponding to K381 in SEQ ID NO: 1. In some embodiments, the modified BoNT polypeptide comprises the amino acid sequence of SEQ ID NO: 59. In some embodiments, the modified BoNT polypeptide consists of the amino acid sequence of SEQ ID NO: 59.

[0208] In some embodiments, the modified BoNT polypeptide is a full-length BoNT/A1 polypeptide comprising the modified protease domain of BoNT/A1 described herein. In some embodiments, the modified BoNT polypeptide comprises an amino acid sequence that is at least 70% (e.g., at least 70%, at least 75%, at least 80%, at least 85%, at least 90%, at least 95%, or at least 99%) identical to SEQ ID NO: 1, and comprises an arginine substitution corresponding to K381 in SEQ ID NO: 1. In some embodiments, the modified BoNT polypeptide comprises the amino acid sequence of SEQ ID NO: 16. In some embodiments, the modified BoNT polypeptide consists of the amino acid sequence of SEQ ID NO: 16.

[0209] In some embodiments, the modified BoNT polypeptide comprises a modified protease domain of BoNT/A1, a translocation domain of BoNT/A1, and a modified receptor binding domain of BoNT/A1. In some embodiments, the modified BoNT polypeptide comprises an amino acid sequence that is at least 70% (e.g., at least 70%, at least 75%, at least 80%, at least 85%, at least 90%, at least 95%, or at least 99%) identical to SEQ ID NO: 1, and comprises an arginine substitution corresponding to K381 in SEQ ID NO: 1 and one or more amino acid substitutions in the receptor binding domain at positions corresponding to 917, 953, 954, 955, 957, 968, 1025, 1026, 1052, 1062, 1063, 1064, 1065, 1066, 1145, 1156, 1232, 1272, 1278, 1288, 1289, 1292, 1294, and 1295 in SEQ ID NO: 1. In some embodiments the one or more amino acid substitutions in the receptor binding domain correspond to one or more of F917R or F917K; F953H or F953Y; N954S; S955K; S957N, S957Q or S957Y; M968I; N1025T; N1026K; N1052K; D1062E; T1063P; H1064R or H1064Q; R1065N; Y1066R or Y1066K; T1145Y; R1156M or R1156I; T1232R or T1232K; E1272G; L1278F, L1278Y or L1278W; D1288E or D1288N; D1289Y; G1292R or G1292K; R1294S or R1294T; and P1295S or P1295T in SEQ ID NO: 1. In some embodiments, the receptor binding domain comprises an amino acid substitution at a position corresponding to 1156 or 1232 in SEQ ID NO: 1. In some embodiments, the receptor binding domain comprises an amino acid substitution that corresponds to R1156M or T1232R in SEQ ID NO: 1.

[0210] In some embodiments, the modified BoNT polypeptide comprises a modified protease domain of BoNT/A1, a translocation domain of BoNT/A1, and a modified receptor binding domain of BoNT/A2. In some embodiments, the modified BoNT polypeptide comprises an amino acid sequence that is at least 70% (e.g., at least 70%, at least 75%, at least 80%, at least 85%, at least 90%, at least 95%, or at least 99%) identical to SEQ ID NO: 78 fused to the amino acid sequence of any one of SEQ ID NO: 131-165 or 205, and comprises an arginine substitution corresponding to K381 in SEQ ID NO: 1 and one or more amino acid substitutions in the receptor binding domain at positions corresponding to 915, 923, 1090, 1103, 1117, 1156, 1170, 1227, 1254, 1255, or 1256 in SEQ ID NO: 35. In some embodiments, the modified BoNT polypeptide comprises an amino acid sequence that comprises SEQ ID NO: 59 fused to the amino acid sequence of any one of SEQ ID NO: 131-165 or 205, and one or more amino acid substitutions in the receptor binding domain at positions corresponding to 915, 923, 1090, 1103, 1117, 1156, 1170, 1227, 1254, 1255, or 1256 in SEQ ID NO: 35. In some embodiments the one or more amino acid substitutions in the receptor binding domain correspond to one or more of K915Q, T923K, S1090N, N1103D, F1117Y, E1156M, E1170K, D1227N, L1254Q, Y1255G, or D1256N in SEQ ID NO: 35.

[0211] In some embodiments, the modified BoNT polypeptide is a chimeric BoNT a receptor binding domain from a BoNT of a different serotype (e.g., BoNT/B, C, D, E, F, G, H, or EN) fused to a polypeptide comprising the translocation domain of BoNT/A1 and a modified protease domain of BoNT/A1 comprising an arginine substitution corresponding to K381 in SEQ ID NO: 1. In some embodiments, the modified BoNT polypeptide comprises a polypeptide comprising an amino acid sequence that is at least 70% (e.g., at least 70%, at least 75%, at least 80%, at least 85%, at least 90%, at least 95%, or at least 99%) identical to any one of SEQ ID NOs: 179-186, fused to a polypeptide comprising the translocation domain of BoNT/A1 and a modified protease domain of BoNT/A1 comprising an arginine substitution corresponding to K381 in SEQ ID NO: 1. In some embodiments, the modified BoNT polypeptide comprises a polypeptide comprising an amino acid sequence that is at least 70% (e.g., at least 70%, at least 75%, at least 80%, at least 85%, at least 90%, at least 95%, or at least 99%) identical to any one of SEQ ID NOs: 179-186, fused to a polypeptide comprising an amino acid sequence that is at least 70% (e.g., at least 70%, at least 75%, at least 80%, at least 85%, at least 90%, at least 95%, or at least 99%) identical to SEQ ID NO: 44 and comprises an arginine substitution corresponding to K381 in SEQ ID NO: 1. In some embodiments, the modified BoNT polypeptide comprises a polypeptide comprising the amino acid sequence of any one of SEQ ID NOs: 179-186, fused to a polypeptide comprising the amino acid sequence of SEQ ID NO: 59. In some embodiments, the modified BoNT polypeptide comprises a polypeptide consisting of the amino acid sequence of any one of SEQ ID NOs: 179-186, fused to a polypeptide consisting of the amino acid sequence of SEQ ID NO: 59. In some embodiments, the modified BoNT polypeptide comprises the amino acid sequence of any one of SEQ ID NOs: 187-194 having an arginine corresponding to K381 in SEQ ID NO: 1.

[0212] In some embodiments, the modified BoNT polypeptide is a modified protease domain of BoNT/A1 described herein. In some embodiments, the modified BoNT polypeptide comprises an amino acid sequence that is at least 70% (e.g., at least 70%, at least 75%, at least 80%, at least 85%, at least 90%, at least 95%, or at least 99%) identical to SEQ ID NO:1, and comprises an arginine substitution corresponding to Y387 in SEQ ID NO: 1. In some embodiments, the modified BoNT polypeptide comprises the amino acid sequence of SEQ ID NO: 103. In some embodiments, the modified BoNT polypeptide consists of the amino acid sequence of SEQ ID NO: 103.

[0213] In some embodiments, the modified BoNT polypeptide comprises a modified protease domain of BoNT/A1 and a translocation domain of BoNT/A1. In some embodiments, the modified BoNT polypeptide comprises an amino acid sequence that is at least 70% (e.g., at least 70%, at least 75%, at least 80%, at least 85%, at least 90%, at least 95%, or at least 99%) identical to SEQ ID NO:1, and comprises an arginine substitution corresponding to Y387 in SEQ ID NO: 1. In some embodiments, the modified BoNT polypeptide comprises the amino acid sequence of SEQ ID NO: 60. In some embodiments, the modified BoNT polypeptide consists of the amino acid sequence of SEQ ID NO: 60.

[0214] In some embodiments, the modified BoNT polypeptide is a full-length BoNT/A1 polypeptide comprising the modified protease domain of BoNT/A1 described herein. In some embodiments, the modified BoNT polypeptide comprises an amino acid sequence that is at least 70% (e.g., at least 70%, at least 75%, at least 80%, at least 85%, at least 90%, at least 95%, or at least 99%) identical to SEQ ID NO: 1, and comprises an arginine substitution corresponding to Y387 in SEQ ID NO: 1. In some embodiments, the modified BoNT polypeptide comprises the amino acid sequence of SEQ ID NO: 17. In some embodiments, the modified BoNT polypeptide consists of the amino acid sequence of SEQ ID NO: 17.

[0215] In some embodiments, the modified BoNT polypeptide comprises a modified protease domain of BoNT/A1, a translocation domain of BoNT/A1, and a modified receptor binding domain of BoNT/A1. In some embodiments, the modified BoNT polypeptide comprises an amino acid sequence that is at least 70% (e.g., at least 70%, at least 75%, at least 80%, at least 85%, at least 90%, at least 95%, or at least 99%) identical to SEQ ID NO: 1, and comprises an arginine substitution corresponding to Y387 in SEQ ID NO: 1 and one or more amino acid substitutions in the receptor binding domain at positions corresponding to 917, 953, 954, 955, 957, 968, 1025, 1026, 1052, 1062, 1063, 1064, 1065, 1066, 1145, 1156, 1232, 1272, 1278, 1288, 1289, 1292, 1294, and 1295 in SEQ ID NO: 1. In some embodiments the one or more amino acid substitutions in the receptor binding domain correspond to one or more of F917R or F917K; F953H or F953Y; N954S; S955K; S957N, S957Q or S957Y; M968I; N1025T; N1026K; N1052K; D1062E; T1063P; H1064R or H1064Q; R1065N; Y1066R or Y1066K; T1145Y; R1156M or R1156I; T1232R or T1232K; E1272G; L1278F, L1278Y or L1278W; D1288E or D1288N; D1289Y; G1292R or G1292K; R1294S or R1294T; and P1295S or P1295T in SEQ ID NO: 1. In some embodiments, the receptor binding domain comprises an amino acid substitution at a position corresponding to 1156 or 1232 in SEQ ID NO: 1. In some embodiments, the receptor binding domain comprises an amino acid substitution that corresponds to R1156M or T1232R in SEQ ID NO: 1.

[0216] In some embodiments, the modified BoNT polypeptide comprises a modified protease domain of BoNT/A1, a translocation domain of BoNT/A1, and a modified receptor binding domain of BoNT/A2. In some embodiments, the modified BoNT polypeptide comprises an amino acid sequence that is at least 70% (e.g., at least 70%, at least 75%, at least 80%, at least 85%, at least 90%, at least 95%, or at least 99%) identical to SEQ ID NO: 78 fused to the amino acid sequence of any one of SEQ ID NO: 131-165 or 205, and comprises an arginine substitution corresponding to Y387 in SEQ ID NO: 1 and one or more amino acid substitutions in the receptor binding domain at positions corresponding to 915, 923, 1090, 1103, 1117, 1156, 1170, 1227, 1254, 1255, or 1256 in SEQ ID NO: 35. In some embodiments, the modified BoNT polypeptide comprises an amino acid sequence that comprises SEQ ID NO: 60 fused to the amino acid sequence of any one of SEQ ID NO: 131-165 or 205, and one or more amino acid substitutions in the receptor binding domain at positions corresponding to 915, 923, 1090, 1103, 1117, 1156, 1170, 1227, 1254, 1255, or 1256 in SEQ ID NO: 35. In some embodiments the one or more amino acid substitutions in the receptor binding domain correspond to one or more of K915Q, T923K, S1090N, N1103D, F1117Y, E1156M, E1170K, D1227N, L1254Q, Y1255G, or D1256N in SEQ ID NO: 35.

[0217] In some embodiments, the modified BoNT polypeptide is a chimeric BoNT a receptor binding domain from a BoNT of a different serotype (e.g., BoNT/B, C, D, E, F, G, H, or EN) fused to a polypeptide comprising the translocation domain of BoNT/A1 and a modified protease domain of BoNT/A1 comprising an arginine substitution corresponding to Y387 in SEQ ID NO: 1. In some embodiments, the modified BoNT polypeptide comprises a polypeptide comprising an amino acid sequence that is at least 70% (e.g., at least 70%, at least 75%, at least 80%, at least 85%, at least 90%, at least 95%, or at least 99%) identical to any one of SEQ ID NOs: 179-186, fused to a polypeptide comprising the translocation domain of BoNT/A1 and a modified protease domain of BoNT/A1 comprising an arginine substitution corresponding to Y387 in SEQ ID NO: 1. In some embodiments, the modified BoNT polypeptide comprises a polypeptide comprising an amino acid sequence that is at least 70% (e.g., at least 70%, at least 75%, at least 80%, at least 85%, at least 90%, at least 95%, or at least 99%) identical to any one of SEQ ID NOs: 179-186, fused to a polypeptide comprising an amino acid sequence that is at least 70% (e.g., at least 70%, at least 75%, at least 80%, at least 85%, at least 90%, at least 95%, or at least 99%) identical to SEQ ID NO: 44 and comprises an arginine substitution corresponding to Y387 in SEQ ID NO: 1. In some embodiments, the modified BoNT polypeptide comprises a polypeptide comprising the amino acid sequence of any one of SEQ ID NOs: 179-186, fused to a polypeptide comprising the amino acid sequence of SEQ ID NO: 60. In some embodiments, the modified BoNT polypeptide comprises a polypeptide consisting of the amino acid sequence of any one of SEQ ID NOs: 179-186, fused to a polypeptide consisting of the amino acid sequence of SEQ ID NO: 60. In some embodiments, the modified BoNT polypeptide comprises the amino acid sequence of any one of SEQ ID NOs: 187-194 having an arginine corresponding to Y387 in SEQ ID NO: 1.

[0218] In some embodiments, the modified BoNT polypeptide is a modified protease domain of BoNT/A1 described herein. In some embodiments, the modified BoNT polypeptide comprises an amino acid sequence that is at least 70% (e.g., at least 70%, at least 75%, at least 80%, at least 85%, at least 90%, at least 95%, or at least 99%) identical to SEQ ID NO:1, and comprises an arginine substitution corresponding to M411 in SEQ ID NO: 1. In some embodiments, the modified BoNT polypeptide comprises the amino acid sequence of SEQ ID NO: 104. In some embodiments, the modified BoNT polypeptide consists of the amino acid sequence of SEQ ID NO: 104.

[0219] In some embodiments, the modified BoNT polypeptide comprises a modified protease domain of BoNT/A1 and a translocation domain of BoNT/A1. In some embodiments, the modified BoNT polypeptide comprises an amino acid sequence that is at least 70% (e.g., at least 70%, at least 75%, at least 80%, at least 85%, at least 90%, at least 95%, or at least 99%) identical to SEQ ID NO:1, and comprises an arginine substitution corresponding to M411 in SEQ ID NO: 1. In some embodiments, the modified BoNT polypeptide comprises the amino acid sequence of SEQ ID NO: 61. In some embodiments, the modified BoNT polypeptide consists of the amino acid sequence of SEQ ID NO: 61.

[0220] In some embodiments, the modified BoNT polypeptide is a full-length BoNT/A1 polypeptide comprising the modified protease domain of BoNT/A1 described herein. In some embodiments, the modified BoNT polypeptide comprises an amino acid sequence that is at least 70% (e.g., at least 70%, at least 75%, at least 80%, at least 85%, at least 90%, at least 95%, or at least 99%) identical to SEQ ID NO: 1, and comprises an arginine substitution corresponding to M411 in SEQ ID NO: 1. In some embodiments, the modified BoNT polypeptide comprises the amino acid sequence of SEQ ID NO: 18. In some embodiments, the modified BoNT polypeptide consists of the amino acid sequence of SEQ ID NO: 18.

[0221] In some embodiments, the modified BoNT polypeptide comprises a modified protease domain of BoNT/A1, a translocation domain of BoNT/A1, and a modified receptor binding domain of BoNT/A1. In some embodiments, the modified BoNT polypeptide comprises an amino acid sequence that is at least 70% (e.g., at least 70%, at least 75%, at least 80%, at least 85%, at least 90%, at least 95%, or at least 99%) identical to SEQ ID NO: 1, and comprises an arginine substitution corresponding to M411 in SEQ ID NO: 1 and one or more amino acid substitutions in the receptor binding domain at positions corresponding to 917, 953, 954, 955, 957, 968, 1025, 1026, 1052, 1062, 1063, 1064, 1065, 1066, 1145, 1156, 1232, 1272, 1278, 1288, 1289, 1292, 1294, and 1295 in SEQ ID NO: 1. In some embodiments the one or more amino acid substitutions in the receptor binding domain correspond to one or more of F917R or F917K; F953H or F953Y; N954S; S955K; S957N, S957Q or S957Y; M968I; N1025T; N1026K; N1052K; D1062E; T1063P; H1064R or H1064Q; R1065N; Y1066R or Y1066K; T1145Y; D1288N; D1289Y; G1292R or G1292K; R1294S or R1294T; and P1295S or P1295T in SEQ ID NO: 1. In some embodiments, the receptor binding domain comprises an amino acid substitution at a position corresponding to 1156 or 1232 in SEQ ID NO: 1. In some embodiments, the receptor binding domain comprises an amino acid substitution that corresponds to R1156M or T1232R in SEQ ID NO: 1.

[0222] In some embodiments, the modified BoNT polypeptide comprises a modified protease domain of BoNT/A1, a translocation domain of BoNT/A1, and a modified receptor binding domain of BoNT/A2. In some embodiments, the modified BoNT polypeptide comprises an amino acid sequence that is at least 70% (e.g., at least 70%, at least 75%, at least 80%, at least 85%, at least 90%, at least 95%, or at least 99%) identical to SEQ ID NO: 78 fused to the amino acid sequence of any one of SEQ ID NO: 131-165 or 205, and comprises an arginine substitution corresponding to M411 in SEQ ID NO: 1 and one or more amino acid substitutions in the receptor binding domain at positions corresponding to 915, 923, 1090, 1103, 1117, 1156, 1170, 1227, 1254, 1255, or 1256 in SEQ ID NO: 35. In some embodiments, the modified BoNT polypeptide comprises an amino acid sequence that comprises SEQ ID NO: 61 fused to the amino acid sequence of any one of SEQ ID NO: 131-165 or 205, and one or more amino acid substitutions in the receptor binding domain at positions corresponding to 915, 923, 1090, 1103, 1117, 1156, 1170, 1227, 1254, 1255, or 1256 in SEQ ID NO: 35. In some embodiments the one or more amino acid substitutions in the receptor binding domain correspond to one or more of K915Q, T923K, 51090N, N1103D, F1117Y, E1156M, E1170K, D1227N, L1254Q, Y1255G, or D1256N in SEQ ID NO: 35.

[0223] In some embodiments, the modified BoNT polypeptide is a chimeric BoNT a receptor binding domain from a BoNT of a different serotype (e.g., BoNT/B, C, D, E, F, G, H, or EN) fused to a polypeptide comprising the translocation domain of BoNT/A1 and a modified protease domain of BoNT/A1 comprising an arginine substitution corresponding to M411 in SEQ ID NO: 1. In some embodiments, the modified BoNT polypeptide comprises a polypeptide comprising an amino acid sequence that is at least 70% (e.g., at least 70%, at least 75%, at least 80%, at least 85%, at least 90%, at least 95%, or at least 99%) identical to any one of SEQ ID NOs: 179-186, fused to a polypeptide comprising the translocation domain of BoNT/A1 and a modified protease domain of BoNT/A1 comprising an arginine substitution corresponding to M411 in SEQ ID NO: 1. In some embodiments, the modified BoNT polypeptide comprises a polypeptide comprising an amino acid sequence that is at least 70% (e.g., at least 70%, at least 75%, at least 80%, at least 85%, at least 90%, at least 95%, or at least 99%) identical to any one of SEQ ID NOs: 179-186, fused to a polypeptide comprising an amino acid sequence that is at least 70% (e.g., at least 70%, at least 75%, at least 80%, at least 85%, at least 90%, at least 95%, or at least 99%) identical to SEQ ID NO: 44 and comprises an arginine substitution corresponding to M411 in SEQ ID NO: 1. In some embodiments, the modified BoNT polypeptide comprises a polypeptide comprising the amino acid sequence of any one of SEQ ID NOs: 179-186, fused to a polypeptide comprising the amino acid sequence of SEQ ID NO: 61. In some embodiments, the modified BoNT polypeptide comprises a polypeptide consisting of the amino acid sequence of any one of SEQ ID NOs: 179-186, fused to a polypeptide consisting of the amino acid sequence of SEQ ID NO: 61. In some embodiments, the modified BoNT polypeptide comprises the amino acid sequence of any one of SEQ ID NOs: 187-194 having an arginine corresponding to M411 in SEQ ID NO: 1.

[0224] In some embodiments, the modified BoNT polypeptide is a modified protease domain of BoNT/A1 described herein. In some embodiments, the modified BoNT polypeptide comprises an amino acid sequence that is at least 70% (e.g., at least 70%, at least 75%, at least 80%, at least 85%, at least 90%, at least 95%, or at least 99%) identical to SEQ ID NO:1, and comprises an arginine substitution corresponding to K415 in SEQ ID NO: 1. In some embodiments, the modified BoNT polypeptide comprises the amino acid sequence of SEQ ID NO: 105. In some embodiments, the modified BoNT polypeptide consists of the amino acid sequence of SEQ ID NO: 105.

[0225] In some embodiments, the modified BoNT polypeptide comprises a modified protease domain of BoNT/A1 and a translocation domain of BoNT/A1. In some embodiments, the modified BoNT polypeptide comprises an amino acid sequence that is at least 70% (e.g., at least 70%, at least 75%, at least 80%, at least 85%, at least 90%, at least 95%, or at least 99%) identical to SEQ ID NO:1, and comprises an arginine substitution corresponding to K415 in SEQ ID NO: 1. In some embodiments, the modified BoNT polypeptide comprises the amino acid sequence of SEQ ID NO: 62. In some embodiments, the modified BoNT polypeptide consists of the amino acid sequence of SEQ ID NO: 62.

[0226] In some embodiments, the modified BoNT polypeptide is a full-length BoNT/A1 polypeptide comprising the modified protease domain of BoNT/A1 described herein. In some embodiments, the modified BoNT polypeptide comprises an amino acid sequence that is at least 70% (e.g., at least 70%, at least 75%, at least 80%, at least 85%, at least 90%, at least 95%, or at least 99%) identical to SEQ ID NO: 1, and comprises an arginine substitution corresponding to K415 in SEQ ID NO: 1. In some embodiments, the modified BoNT polypeptide comprises the amino acid sequence of SEQ ID NO: 19. In some embodiments, the modified BoNT polypeptide consists of the amino acid sequence of SEQ ID NO: 19.

[0227] In some embodiments, the modified BoNT polypeptide comprises a modified protease domain of BoNT/A1, a translocation domain of BoNT/A1, and a modified receptor binding domain of BoNT/A1. In some embodiments, the modified BoNT polypeptide comprises an amino acid sequence that is at least 70% (e.g., at least 70%, at least 75%, at least 80%, at least 85%, at least 90%, at least 95%, or at least 99%) identical to SEQ ID NO: 1, and comprises an arginine substitution corresponding to K415 in SEQ ID NO: 1 and one or more amino acid substitutions in the receptor binding domain at positions corresponding to 917, 953, 954, 955, 957, 968, 1025, 1026, 1052, 1062, 1063, 1064, 1065, 1066, 1145, 1156, 1232, 1272, 1278, 1288, 1289, 1292, 1294, and 1295 in SEQ ID NO: 1. In some embodiments the one or more amino acid substitutions in the receptor binding domain correspond to one or more of F917R or F917K; F953H or F953Y; N954S; S955K; S957N, S957Q or S957Y; M968I; N1025T; N1026K; N1052K; D1062E; T1063P; H1064R or H1064Q; R1065N; Y1066R or Y1066K; T1145Y; R1156M or R1156I; T1232R or T1232K; E1272G; L1278F, L1278Y or L1278W; D1288E or D1288N; D1289Y; G1292R or G1292K; R1294S or R1294T; and P1295S or P1295T in SEQ ID NO: 1. In some embodiments, the receptor binding domain comprises an amino acid substitution at a position corresponding to 1156 or 1232 in SEQ ID NO: 1. In some embodiments, the receptor binding domain comprises an amino acid substitution that corresponds to R1156M or T1232R in SEQ ID NO: 1.

[0228] In some embodiments, the modified BoNT polypeptide comprises a modified protease domain of BoNT/A1, a translocation domain of BoNT/A1, and a modified receptor binding domain of BoNT/A2. In some embodiments, the modified BoNT polypeptide comprises an amino acid sequence that is at least 70% (e.g., at least 70%, at least 75%, at least 80%, at least 85%, at least 90%, at least 95%, or at least 99%) identical to SEQ ID NO: 78 fused to the amino acid sequence of any one of SEQ ID NO: 131-165 or 205, and comprises an arginine substitution corresponding to K415 in SEQ ID NO: 1 and one or more amino acid substitutions in the receptor binding domain at positions corresponding to 915, 923, 1090, 1103, 1117, 1156, 1170, 1227, 1254, 1255, or 1256 in SEQ ID NO: 35. In some embodiments, the modified BoNT polypeptide comprises an amino acid sequence that comprises SEQ ID NO: 62 fused to the amino acid sequence of any one of SEQ ID NO: 131-165 or 205, and one or more amino acid substitutions in the receptor binding domain at positions corresponding to 915, 923, 1090, 1103, 1117, 1156, 1170, 1227, 1254, 1255, or 1256 in SEQ ID NO: 35. In some embodiments the one or more amino acid substitutions in the receptor binding domain correspond to one or more of K915Q, T923K, S1090N, N1103D, F1117Y, E1156M, E1170K, D1227N, L1254Q, Y1255G, or D1256N in SEQ ID NO: 35.

[0229] In some embodiments, the modified BoNT polypeptide is a chimeric BoNT a receptor binding domain from a BoNT of a different serotype (e.g., BoNT/B, C, D, E, F, G, H, or EN) fused to a polypeptide comprising the translocation domain of BoNT/A1 and a modified protease domain of BoNT/A1 comprising an arginine substitution corresponding to K415 in SEQ ID NO: 1. In some embodiments, the modified BoNT polypeptide comprises a polypeptide comprising an amino acid sequence that is at least 70% (e.g., at least 70%, at least 75%, at least 80%, at least 85%, at least 90%, at least 95%, or at least 99%) identical to any one of SEQ ID NOs: 179-186, fused to a polypeptide comprising the translocation domain of BoNT/A1 and a modified protease domain of BoNT/A1 comprising an arginine substitution corresponding to K415 in SEQ ID NO: 1. In some embodiments, the modified BoNT polypeptide comprises a polypeptide comprising an amino acid sequence that is at least 70% (e.g., at least 70%, at least 75%, at least 80%, at least 85%, at least 90%, at least 95%, or at least 99%) identical to any one of SEQ ID NOs: 179-186, fused to a polypeptide comprising an amino acid sequence that is at least 70% (e.g., at least 70%, at least 75%, at least 80%, at least 85%, at least 90%, at least 95%, or at least 99%) identical to SEQ ID NO: 44 and comprises an arginine substitution corresponding to K415 in SEQ ID NO: 1. In some embodiments, the modified BoNT polypeptide comprises a polypeptide comprising the amino acid sequence of any one of SEQ ID NOs: 179-186, fused to a polypeptide comprising the amino acid sequence of SEQ ID NO: 62. In some embodiments, the modified BoNT polypeptide comprises a polypeptide consisting of the amino acid sequence of any one of SEQ ID NOs: 179-186, fused to a polypeptide consisting of the amino acid sequence of SEQ ID NO: 62. In some embodiments, the modified BoNT polypeptide comprises the amino acid sequence of any one of SEQ ID NOs: 187-194 having an arginine corresponding to K415 in SEQ ID NO: 1.

[0230] In some embodiments, the modified BoNT polypeptide is a modified protease domain of BoNT/A1 described herein. In some embodiments, the modified BoNT polypeptide comprises an amino acid sequence that is at least 70% (e.g., at least 70%, at least 75%, at least 80%, at least 85%, at least 90%, at least 95%, or at least 99%) identical to SEQ ID NO:1, and comprises arginine substitutions at positions corresponding to one or more of K11, K335, K337, K343, K375, and K415 in SEQ ID NO: 1. In some embodiments, the modified BoNT polypeptide comprises an amino acid sequence that is at least 70% (e.g., at least 70%, at least 75%, at least 80%, at least 85%, at least 90%, at least 95%, or at least 99%) identical to SEQ ID NO:1, and comprises arginine substitutions at positions corresponding to K11, K335, K337, K343, K375, and K415 in SEQ ID NO: 1. In some embodiments, the group of arginine substitutions at positions corresponding to K11, K335, K337, K343, K375, and K415 in SEQ ID NO: 1 is referred to as Group 0. In some embodiments, the modified BoNT polypeptide comprises the amino acid sequence of SEQ ID NO: 106. In some embodiments, the modified BoNT polypeptide consists of the amino acid sequence of SEQ ID NO: 106.

[0231] In some embodiments, the modified BoNT polypeptide comprises a modified protease domain of BoNT/A1 and a translocation domain of BoNT/A1. In some embodiments, the modified BoNT polypeptide comprises an amino acid sequence that is at least 70% (e.g., at least 70%, at least 75%, at least 80%, at least 85%, at least 90%, at least 95%, or at least 99%) identical to SEQ ID NO:1, and comprises arginine substitutions a positions corresponding to one or more of K11, K335, K337, K343, K375, and K415 in SEQ ID NO: 1. In some embodiments, the modified BoNT polypeptide comprises an amino acid sequence that is at least 70% (e.g., at least 70%, at least 75%, at least 80%, at least 85%, at least 90%, at least 95%, or at least 99%) identical to SEQ ID NO:1, and comprises arginine substitutions a positions corresponding to K11, K335, K337, K343, K375, and K415 in SEQ ID NO: 1. In some embodiments, the modified BoNT polypeptide comprises the amino acid sequence of SEQ ID NO: 63. In some embodiments, the modified BoNT polypeptide consists of the amino acid sequence of SEQ ID NO: 63.

[0232] In some embodiments, the modified BoNT polypeptide is a full-length BoNT/A1 polypeptide comprising the modified protease domain of BoNT/A1 described herein. In some embodiments, the modified BoNT polypeptide comprises an amino acid sequence that is at least 70% (e.g., at least 70%, at least 75%, at least 80%, at least 85%, at least 90%, at least 95%, or at least 99%) identical to SEQ ID NO: 1, and comprises arginine substitutions at positions corresponding to one or more of K11, K335, K337, K343, K375, and K415 in SEQ ID NO: 1. In some embodiments, the modified BoNT polypeptide comprises an amino acid sequence that is at least 70% (e.g., at least 70%, at least 75%, at least 80%, at least 85%, at least 90%, at least 95%, or at least 99%) identical to SEQ ID NO: 1, and comprises arginine substitutions at positions corresponding to K11, K335, K337, K343, K375, and K415 in SEQ ID NO: 1. In some embodiments, the modified BoNT polypeptide comprises the amino acid sequence of SEQ ID NO: 20. In some embodiments, the modified BoNT polypeptide consists of the amino acid sequence of SEQ ID NO: 20.

[0233] In some embodiments, the modified BoNT polypeptide comprises a modified protease domain of BoNT/A1, a translocation domain of BoNT/A1, and a modified receptor binding domain of BoNT/A1. In some embodiments, the modified BoNT polypeptide comprises an amino acid sequence that is at least 70% (e.g., at least 70%, at least 75%, at least 80%, at least 85%, at least 90%, at least 95%, or at least 99%) identical to SEQ ID NO: 1, and comprises arginine substitutions a positions corresponding to one or more of K11, K335, K337, K343, K375, and K415 in SEQ ID NO: 1 and one or more amino acid substitutions in the receptor binding domain at positions corresponding to 917, 953, 954, 955, 957, 968, 1025, 1026, 1052, 1062, 1063, 1064, 1065, 1066, 1145, 1156, 1232, 1272, 1278, 1288, 1289, 1292, 1294, and 1295 in SEQ ID NO: 1. In some embodiments, the modified BoNT polypeptide comprises an amino acid sequence that is at least 70% (e.g., at least 70%, at least 75%, at least 80%, at least 85%, at least 90%, at least 95%, or at least 99%) identical to SEQ ID NO: 1, and comprises arginine substitutions a positions corresponding to K11, K335, K337, K343, K375, and K415 in SEQ ID NO: 1 and one or more amino acid substitutions in the receptor binding domain at positions corresponding to 917, 953, 954, 955, 957, 968, 1025, 1026, 1052, 1062, 1063, 1064, 1065, 1066, 1145, 1156, 1232, 1272, 1278, 1288, 1289, 1292, 1294, and 1295 in SEQ ID NO: 1. In some embodiments the one or more amino acid substitutions in the receptor binding domain correspond to one or more of F917R or F917K; F953H or F953Y; N954S; S955K; S957N, S957Q or S957Y; M968I; N1025T; N1026K; N1052K; D1062E; T1063P; H1064R or H1064Q; R1065N; Y1066R or Y1066K; T1145Y; R1156M or R1156I; T1232R or T1232K; E1272G; L1278F, L1278Y or L1278W; D1288E or D1288N; D1289Y; G1292R or G1292K; R1294S or R1294T; and P1295S or P1295T in SEQ ID NO: 1. In some embodiments, the receptor binding domain comprises an amino acid substitution at a position corresponding to 1156 or 1232 in SEQ ID NO: 1. In some embodiments, the receptor binding domain comprises an amino acid substitution that corresponds to R1156M or T1232R in SEQ ID NO: 1.

[0234] In some embodiments, the modified BoNT polypeptide comprises a modified protease domain of BoNT/A1, a translocation domain of BoNT/A1, and a modified receptor binding domain of BoNT/A2. In some embodiments, the modified BoNT polypeptide comprises an amino acid sequence that is at least 70% (e.g., at least 70%, at least 75%, at least 80%, at least 85%, at least 90%, at least 95%, or at least 99%) identical to SEQ ID NO: 78 fused to the amino acid sequence of any one of SEQ ID NO: 131-165 or 205, and comprises arginine substitutions at positions corresponding to one or more of K11, K335, K337, K343, K375, and K415 in SEQ ID NO: 1 and one or more amino acid substitutions in the receptor binding domain at positions corresponding to 915, 923, 1090, 1103, 1117, 1156, 1170, 1227, 1254, 1255, or 1256 in SEQ ID NO: 35. In some embodiments, the modified BoNT polypeptide comprises an amino acid sequence that is at least 70% (e.g., at least 70%, at least 75%, at least 80%, at least 85%, at least 90%, at least 95%, or at least 99%) identical to SEQ ID NO: 63 fused to the amino acid sequence of any one of SEQ ID NO: 131-165 or 205, and comprising one or more amino acid substitutions in the receptor binding domain at positions corresponding to 915, 923, 1090, 1103, 1117, 1156, 1170, 1227, 1254, 1255, or 1256 in SEQ ID NO: 35. In some embodiments the one or more amino acid substitutions in the receptor binding domain correspond to one or more of K915Q, T923K, 51090N, N1103D, F1117Y, E1156M, E1170K, D1227N, L1254Q, Y1255G, or D1256N in SEQ ID NO: 35.

[0235] In some embodiments, the modified BoNT polypeptide is a chimeric BoNT comprising a receptor binding domain from a BoNT of a different serotype (e.g., BoNT/B, C, D, E, F, G, H, or EN) fused to a polypeptide comprising the translocation domain of BoNT/A1 and a modified protease domain of BoNT/A1 comprising arginine substitutions at positions corresponding to K11, K335, K337, K343, K375, and K415 in SEQ ID NO: 1. In some embodiments, the modified BoNT polypeptide comprises a polypeptide comprising an amino acid sequence that is at least 70% (e.g., at least 70%, at least 75%, at least 80%, at least 85%, at least 90%, at least 95%, or at least 99%) identical to any one of SEQ ID NOs: 179-186, fused to a polypeptide comprising the translocation domain of BoNT/A1 and a modified protease domain of BoNT/A1 comprising arginine substitutions at positions corresponding to one or more of K11, K335, K337, K343, K375, and K415 in SEQ ID NO: 1. In some embodiments, the modified BoNT polypeptide comprises a polypeptide comprising an amino acid sequence that is at least 70% (e.g., at least 70%, at least 75%, at least 80%, at least 85%, at least 90%, at least 95%, or at least 99%) identical to any one of SEQ ID NOs: 179-186, fused to a polypeptide comprising the translocation domain of BoNT/A1 and a modified protease domain of BoNT/A1 comprising arginine substitutions at positions corresponding to K11, K335, K337, K343, K375, and K415 in SEQ ID NO: 1. In some embodiments, the modified BoNT polypeptide comprises a polypeptide comprising a receptor binding domain amino acid sequence that is at least 70% (e.g., at least 70%, at least 75%, at least 80%, at least 85%, at least 90%, at least 95%, or at least 99%) identical to any one of SEQ ID NOs: 179-186, fused to a polypeptide comprising an amino acid sequence that is at least 70% (e.g., at least 70%, at least 75%, at least 80%, at least 85%, at least 90%, at least 95%, or at least 99%) identical to SEQ ID NO: 44 and comprising arginine substitutions at positions corresponding to K11, K335, K337, K343, K375, and K415 in SEQ ID NO: 1. In some embodiments, the modified BoNT polypeptide comprises a polypeptide comprising the amino acid sequence of any one of SEQ ID NOs: 179-186, fused to a polypeptide comprising the amino acid sequence of SEQ ID NO: 63. In some embodiments, the modified BoNT polypeptide comprises a polypeptide consisting of the amino acid sequence of any one of SEQ ID NOs: 179-186, fused to an amino acid sequence consisting of the amino acid sequence of SEQ ID NO: 63. In some embodiments, the modified BoNT polypeptide comprises the amino acid sequence of any one of SEQ ID NOs: 187-194 having arginine substitutions at positions corresponding to one or more of K11, K335, K337, K343, K375, and K415 in SEQ ID NO: 1. In some embodiments, the modified BoNT polypeptide comprises the amino acid sequence of any one of SEQ ID NOs: 187-194 having arginine substitutions at positions corresponding to K11, K335, K337, K343, K375, and K415 in SEQ ID NO: 1.

[0236] In some embodiments, the modified BoNT polypeptide is a modified protease domain of BoNT/A1 described herein. In some embodiments, the modified BoNT polypeptide comprises an amino acid sequence that is at least 70% (e.g., at least 70%, at least 75%, at least 80%, at least 85%, at least 90%, at least 95%, or at least 99%) identical to SEQ ID NO:1, and comprises arginine substitutions at positions corresponding to one or more of K41, K318, and K340 in SEQ ID NO: 1. In some embodiments, the modified BoNT polypeptide comprises an amino acid sequence that is at least 70% (e.g., at least 70%, at least 75%, at least 80%, at least 85%, at least 90%, at least 95%, or at least 99%) identical to SEQ ID NO:1, and comprises arginine substitutions at positions corresponding to K41, K318, and K340 in SEQ ID NO: 1. In some embodiments, the group of arginine substitutions at positions corresponding to K41, K318, and K340 in SEQ ID NO: 1 is referred to as Group 1. In some embodiments, the modified BoNT polypeptide comprises the amino acid sequence of SEQ ID NO: 107. In some embodiments, the modified BoNT polypeptide consists of the amino acid sequence of SEQ ID NO: 107.

[0237] In some embodiments, the modified BoNT polypeptide comprises a modified protease domain of BoNT/A1 and a translocation domain of BoNT/A1. In some embodiments, the modified BoNT polypeptide comprises an amino acid sequence that is at least 70% (e.g., at least 70%, at least 75%, at least 80%, at least 85%, at least 90%, at least 95%, or at least 99%) identical to SEQ ID NO:1, and comprises arginine substitutions a positions corresponding to one or more of K41, K318, and K340 in SEQ ID NO: 1. In some embodiments, the modified BoNT polypeptide comprises an amino acid sequence that is at least 70% (e.g., at least 70%, at least 75%, at least 80%, at least 85%, at least 90%, at least 95%, or at least 99%) identical to SEQ ID NO:1, and comprises arginine substitutions a positions corresponding to K41, K318, and K340 in SEQ ID NO: 1. In some embodiments, the modified BoNT polypeptide comprises the amino acid sequence of SEQ ID NO: 64. In some embodiments, the modified BoNT polypeptide consists of the amino acid sequence of SEQ ID NO: 64.

[0238] In some embodiments, the modified BoNT polypeptide is a full-length BoNT/A1 polypeptide comprising the modified protease domain of BoNT/A1 described herein. In some embodiments, the modified BoNT polypeptide comprises an amino acid sequence that is at least 70% (e.g., at least 70%, at least 75%, at least 80%, at least 85%, at least 90%, at least 95%, or at least 99%) identical to SEQ ID NO: 1, and comprises arginine substitutions at positions corresponding to one or more of K41, K318, and K340 in SEQ ID NO: 1. In some embodiments, the modified BoNT polypeptide comprises an amino acid sequence that is at least 70% (e.g., at least 70%, at least 75%, at least 80%, at least 85%, at least 90%, at least 95%, or at least 99%) identical to SEQ ID NO: 1, and comprises arginine substitutions at positions corresponding to K41, K318, and K340 in SEQ ID NO: 1. In some embodiments, the modified BoNT polypeptide comprises the amino acid sequence of SEQ ID NO: 21. In some embodiments, the modified BoNT polypeptide consists of the amino acid sequence of SEQ ID NO: 21.

[0239] In some embodiments, the modified BoNT polypeptide comprises a modified protease domain of BoNT/A1, a translocation domain of BoNT/A1, and a modified receptor binding domain of BoNT/A1. In some embodiments, the modified BoNT polypeptide comprises an amino acid sequence that is at least 70% (e.g., at least 70%, at least 75%, at least 80%, at least 85%, at least 90%, at least 95%, or at least 99%) identical to SEQ ID NO: 1, and comprises arginine substitutions a positions corresponding to one or more of K41, K318, and K340 in SEQ ID NO: 1 and one or more amino acid substitutions in the receptor binding domain at positions corresponding to 917, 953, 954, 955, 957, 968, 1025, 1026, 1052, 1062, 1063, 1064, 1065, 1066, 1145, 1156, 1232, 1272, 1278, 1288, 1289, 1292, 1294, and 1295 in SEQ ID NO: 1. In some embodiments, the modified BoNT polypeptide comprises an amino acid sequence that is at least 70% (e.g., at least 70%, at least 75%, at least 80%, at least 85%, at least 90%, at least 95%, or at least 99%) identical to SEQ ID NO: 1, and comprises arginine substitutions a positions corresponding to K41, K318, and K340 in SEQ ID NO: 1 and one or more amino acid substitutions in the receptor binding domain at positions corresponding to 917, 953, 954, 955, 957, 968, 1025, 1026, 1052, 1062, 1063, 1064, 1065, 1066, 1145, 1156, 1232, 1272, 1278, 1288, 1289, 1292, 1294, and 1295 in SEQ ID NO: 1. In some embodiments the one or more amino acid substitutions in the receptor binding domain correspond to one or more of F917R or F917K; F953H or F953Y; N954S; S955K; S957N, S957Q or S957Y; M968I; N1025T; N1026K; N1052K; D1062E; T1063P; H1064R or H1064Q; R1065N; Y1066R or Y1066K; T1145Y; R1156M or R1156I; T1232R or T1232K; E1272G; L1278F, L1278Y or L1278W; D1288E or D1288N; D1289Y; G1292R or G1292K; R1294S or R1294T; and P1295S or P1295T in SEQ ID NO: 1. In some embodiments, the receptor binding domain comprises an amino acid substitution at a position corresponding to 1156 or 1232 in SEQ ID NO: 1. In some embodiments, the receptor binding domain comprises an amino acid substitution that corresponds to R1156M or T1232R in SEQ ID NO: 1.

[0240] In some embodiments, the modified BoNT polypeptide comprises a modified protease domain of BoNT/A1, a translocation domain of BoNT/A1, and a modified receptor binding domain of BoNT/A2. In some embodiments, the modified BoNT polypeptide comprises an amino acid sequence that is at least 70% (e.g., at least 70%, at least 75%, at least 80%, at least 85%, at least 90%, at least 95%, or at least 99%) identical to SEQ ID NO: 78 fused to the amino acid sequence of any one of SEQ ID NO: 131-165 or 205, and comprises arginine substitutions at positions corresponding to one or more of K41, K318, and K340 in SEQ ID NO: 1 and one or more amino acid substitutions in the receptor binding domain at positions corresponding to 915, 923, 1090, 1103, 1117, 1156, 1170, 1227, 1254, 1255, or 1256 in SEQ ID NO: 35. In some embodiments, the modified BoNT polypeptide comprises an amino acid sequence that is at least 70% (e.g., at least 70%, at least 75%, at least 80%, at least 85%, at least 90%, at least 95%, or at least 99%) identical to SEQ ID NO: 64 fused to the amino acid sequence of any one of SEQ ID NO: 131-165 or 205, and comprising one or more amino acid substitutions in the receptor binding domain at positions corresponding to 915, 923, 1090, 1103, 1117, 1156, 1170, 1227, 1254, 1255, or 1256 in SEQ ID NO: 35. In some embodiments the one or more amino acid substitutions in the receptor binding domain correspond to one or more of K915Q, T923K, S1090N, N1103D, F1117Y, E1156M, E1170K, D1227N, L1254Q, Y1255G, or D1256N in SEQ ID NO: 35.

[0241] In some embodiments, the modified BoNT polypeptide is a chimeric BoNT comprising a receptor binding domain from a BoNT of a different serotype (e.g., BoNT/B, C, D, E, F, G, H, or EN) fused to a polypeptide comprising the translocation domain of BoNT/A1 and a modified protease domain of BoNT/A1 comprising arginine substitutions at positions corresponding to K41, K318, and K340 in SEQ ID NO: 1. In some embodiments, the modified BoNT polypeptide comprises a polypeptide comprising an amino acid sequence that is at least 70% (e.g., at least 70%, at least 75%, at least 80%, at least 85%, at least 90%, at least 95%, or at least 99%) identical to any one of SEQ ID NOs: 179-186, fused to a polypeptide comprising the translocation domain of BoNT/A1 and a modified protease domain of BoNT/A1 comprising arginine substitutions at positions corresponding to one or more of K41, K318, and K340 in SEQ ID NO: 1. In some embodiments, the modified BoNT polypeptide comprises a polypeptide comprising an amino acid sequence that is at least 70% (e.g., at least 70%, at least 75%, at least 80%, at least 85%, at least 90%, at least 95%, or at least 99%) identical to any one of SEQ ID NOs: 179-186, fused to a polypeptide comprising the translocation domain of BoNT/A1 and a modified protease domain of BoNT/A1 comprising arginine substitutions at positions corresponding to K41, K318, and K340 in SEQ ID NO: 1. In some embodiments, the modified BoNT polypeptide comprises a polypeptide comprising a receptor binding domain amino acid sequence that is at least 70% (e.g., at least 70%, at least 75%, at least 80%, at least 85%, at least 90%, at least 95%, or at least 99%) identical to any one of SEQ ID NOs: 179-186, fused to a polypeptide comprising an amino acid sequence that is at least 70% (e.g., at least 70%, at least 75%, at least 80%, at least 85%, at least 90%, at least 95%, or at least 99%) identical to SEQ ID NO: 44 and comprising arginine substitutions at positions corresponding to K41, K318, and K340 in SEQ ID NO: 1. In some embodiments, the modified BoNT polypeptide comprises a polypeptide comprising the amino acid sequence of any one of SEQ ID NOs: 179-186, fused to a polypeptide comprising the amino acid sequence of SEQ ID NO: 64. In some embodiments, the modified BoNT polypeptide comprises a polypeptide consisting of the amino acid sequence of any one of SEQ ID NOs: 179-186, fused to an amino acid sequence consisting of the amino acid sequence of SEQ ID NO: 64. In some embodiments, the modified BoNT polypeptide comprises the amino acid sequence of any one of SEQ ID NOs: 187-194 having arginine substitutions at positions corresponding to one or more of K41, K318, and K340 in SEQ ID NO: 1. In some embodiments, the modified BoNT polypeptide comprises the amino acid sequence of any one of SEQ ID NOs: 187-194 having arginine substitutions at positions corresponding to K41, K318, and K340 in SEQ ID NO: 1.

[0242] In some embodiments, the modified BoNT polypeptide is a modified protease domain of BoNT/A1 described herein. In some embodiments, the modified BoNT polypeptide comprises an amino acid sequence that is at least 70% (e.g., at least 70%, at least 75%, at least 80%, at least 85%, at least 90%, at least 95%, or at least 99%) identical to SEQ ID NO:1, and comprises arginine substitutions at positions corresponding to one or more of K289, K291, K299, and K381 in SEQ ID NO: 1. In some embodiments, the modified BoNT polypeptide comprises an amino acid sequence that is at least 70% (e.g., at least 70%, at least 75%, at least 80%, at least 85%, at least 90%, at least 95%, or at least 99%) identical to SEQ ID NO:1, and comprises arginine substitutions at positions corresponding to K289, K291, K299, and K381 in SEQ ID NO: 1. In some embodiments, the group of arginine substitutions at positions corresponding to K289, K291, K299, and K381 in SEQ ID NO: 1 is referred to as Group 2. In some embodiments, the modified BoNT polypeptide comprises the amino acid sequence of SEQ ID NO: 108. In some embodiments, the modified BoNT polypeptide consists of the amino acid sequence of SEQ ID NO: 108.

[0243] In some embodiments, the modified BoNT polypeptide comprises a modified protease domain of BoNT/A1 and a translocation domain of BoNT/A1. In some embodiments, the modified BoNT polypeptide comprises an amino acid sequence that is at least 70% (e.g., at least 70%, at least 75%, at least 80%, at least 85%, at least 90%, at least 95%, or at least 99%) identical to SEQ ID NO:1, and comprises arginine substitutions a positions corresponding to one or more of K289, K291, K299, and K381 in SEQ ID NO: 1. In some embodiments, the modified BoNT polypeptide comprises an amino acid sequence that is at least 70% (e.g., at least 70%, at least 75%, at least 80%, at least 85%, at least 90%, at least 95%, or at least 99%) identical to SEQ ID NO:1, and comprises arginine substitutions a positions corresponding to K289, K291, K299, and K381 in SEQ ID NO: 1. In some embodiments, the modified BoNT polypeptide comprises the amino acid sequence of SEQ ID NO: 65. In some embodiments, the modified BoNT polypeptide consists of the amino acid sequence of SEQ ID NO: 65.

[0244] In some embodiments, the modified BoNT polypeptide is a full-length BoNT/A1 polypeptide comprising the modified protease domain of BoNT/A1 described herein. In some embodiments, the modified BoNT polypeptide comprises an amino acid sequence that is at least 70% (e.g., at least 70%, at least 75%, at least 80%, at least 85%, at least 90%, at least 95%, or at least 99%) identical to SEQ ID NO: 1, and comprises arginine substitutions at positions corresponding to one or more of K289, K291, K299, and K381 in SEQ ID NO: 1. In some embodiments, the modified BoNT polypeptide comprises an amino acid sequence that is at least 70% (e.g., at least 70%, at least 75%, at least 80%, at least 85%, at least 90%, at least 95%, or at least 99%) identical to SEQ ID NO: 1, and comprises arginine substitutions at positions corresponding to K289, K291, K299, and K381 in SEQ ID NO: 1. In some embodiments, the modified BoNT polypeptide comprises the amino acid sequence of SEQ ID NO: 22. In some embodiments, the modified BoNT polypeptide consists of the amino acid sequence of SEQ ID NO: 22.

[0245] In some embodiments, the modified BoNT polypeptide comprises a modified protease domain of BoNT/A1, a translocation domain of BoNT/A1, and a modified receptor binding domain of BoNT/A1. In some embodiments, the modified BoNT polypeptide comprises an amino acid sequence that is at least 70% (e.g., at least 70%, at least 75%, at least 80%, at least 85%, at least 90%, at least 95%, or at least 99%) identical to SEQ ID NO: 1, and comprises arginine substitutions a positions corresponding to one or more of K289, K291, K299, and K381 in SEQ ID NO: 1 and one or more amino acid substitutions in the receptor binding domain at positions corresponding to 917, 953, 954, 955, 957, 968, 1025, 1026, 1052, 1062, 1063, 1064, 1065, 1066, 1145, 1156, 1232, 1272, 1278, 1288, 1289, 1292, 1294, and 1295 in SEQ ID NO: 1. In some embodiments, the modified BoNT polypeptide comprises an amino acid sequence that is at least 70% (e.g., at least 70%, at least 75%, at least 80%, at least 85%, at least 90%, at least 95%, or at least 99%) identical to SEQ ID NO: 1, and comprises arginine substitutions a positions corresponding to K289, K291, K299, and K381 in SEQ ID NO: 1 and one or more amino acid substitutions in the receptor binding domain at positions corresponding to 917, 953, 954, 955, 957, 968, 1025, 1026, 1052, 1062, 1063, 1064, 1065, 1066, 1145, 1156, 1232, 1272, 1278, 1288, 1289, 1292, 1294, and 1295 in SEQ ID NO: 1. In some embodiments the one or more amino acid substitutions in the receptor binding domain correspond to one or more of F917R or F917K; F953H or F953Y; N954S; S955K; S957N, S957Q or S957Y; M968I; N1025T; N1026K; N1052K; D1062E; T1063P; H1064R or H1064Q; R1065N; Y1066R or Y1066K; T1145Y; R1156M or R1156I; T1232R or T1232K; E1272G; L1278F, L1278Y or L1278W; D1288E or D1288N; D1289Y; G1292R or G1292K; R1294S or R1294T; and P1295S or P1295T in SEQ ID NO: 1. In some embodiments, the receptor binding domain comprises an amino acid substitution at a position corresponding to 1156 or 1232 in SEQ ID NO: 1. In some embodiments, the receptor binding domain comprises an amino acid substitution that corresponds to R1156M or T1232R in SEQ ID NO: 1.

[0246] In some embodiments, the modified BoNT polypeptide comprises a modified protease domain of BoNT/A1, a translocation domain of BoNT/A1, and a modified receptor binding domain of BoNT/A2. In some embodiments, the modified BoNT polypeptide comprises an amino acid sequence that is at least 70% (e.g., at least 70%, at least 75%, at least 80%, at least 85%, at least 90%, at least 95%, or at least 99%) identical to SEQ ID NO: 78 fused to the amino acid sequence of any one of SEQ ID NO: 131-165 or 205, and comprises arginine substitutions at positions corresponding to one or more of K289, K291, K299, and K381 in SEQ ID NO: 1 and one or more amino acid substitutions in the receptor binding domain at positions corresponding to 915, 923, 1090, 1103, 1117, 1156, 1170, 1227, 1254, 1255, or 1256 in SEQ ID NO: 35. In some embodiments, the modified BoNT polypeptide comprises an amino acid sequence that is at least 70% (e.g., at least 70%, at least 75%, at least 80%, at least 85%, at least 90%, at least 95%, or at least 99%) identical to SEQ ID NO: 65 fused to the amino acid sequence of any one of SEQ ID NO: 131-165 or 205, and comprising one or more amino acid substitutions in the receptor binding domain at positions corresponding to 915, 923, 1090, 1103, 1117, 1156, 1170, 1227, 1254, 1255, or 1256 in SEQ ID NO: 35. In some embodiments the one or more amino acid substitutions in the receptor binding domain correspond to one or more of K915Q, T923K, 51090N, N1103D, F1117Y, E1156M, E1170K, D1227N, L1254Q, Y1255G, or D1256N in SEQ ID NO: 35.

[0247] In some embodiments, the modified BoNT polypeptide is a chimeric BoNT comprising a receptor binding domain from a BoNT of a different serotype (e.g., BoNT/B, C, D, E, F, G, H, or EN) fused to a polypeptide comprising the translocation domain of BoNT/A1 and a modified protease domain of BoNT/A1 comprising arginine substitutions at positions corresponding to K289, K291, K299, and K381 in SEQ ID NO: 1. In some embodiments, the modified BoNT polypeptide comprises a polypeptide comprising an amino acid sequence that is at least 70% (e.g., at least 70%, at least 75%, at least 80%, at least 85%, at least 90%, at least 95%, or at least 99%) identical to any one of SEQ ID NOs: 179-186, fused to a polypeptide comprising the translocation domain of BoNT/A1 and a modified protease domain of BoNT/A1 comprising arginine substitutions at positions corresponding to one or more of K289, K291, K299, and K381 in SEQ ID NO: 1. In some embodiments, the modified BoNT polypeptide comprises a polypeptide comprising an amino acid sequence that is at least 70% (e.g., at least 70%, at least 75%, at least 80%, at least 85%, at least 90%, at least 95%, or at least 99%) identical to any one of SEQ ID NOs: 179-186, fused to a polypeptide comprising the translocation domain of BoNT/A1 and a modified protease domain of BoNT/A1 comprising arginine substitutions at positions corresponding to K289, K291, K299, and K381 in SEQ ID NO: 1. In some embodiments, the modified BoNT polypeptide comprises a polypeptide comprising a receptor binding domain amino acid sequence that is at least 70% (e.g., at least 70%, at least 75%, at least 80%, at least 85%, at least 90%, at least 95%, or at least 99%) identical to any one of SEQ ID NOs: 179-186, fused to a polypeptide comprising an amino acid sequence that is at least 70% (e.g., at least 70%, at least 75%, at least 80%, at least 85%, at least 90%, at least 95%, or at least 99%) identical to SEQ ID NO: 44 and comprising arginine substitutions at positions corresponding to K289, K291, K299, and K381 in SEQ ID NO: 1. In some embodiments, the modified BoNT polypeptide comprises a polypeptide comprising the amino acid sequence of any one of SEQ ID NOs: 179-186, fused to a polypeptide comprising the amino acid sequence of SEQ ID NO: 65. In some embodiments, the modified BoNT polypeptide comprises a polypeptide consisting of the amino acid sequence of any one of SEQ ID NOs: 179-186, fused to an amino acid sequence consisting of the amino acid sequence of SEQ ID NO: 65. In some embodiments, the modified BoNT polypeptide comprises the amino acid sequence of any one of SEQ ID NOs: 187-194 having arginine substitutions at positions corresponding to one or more of K289, K291, K299, and K381 in SEQ ID NO: 1. In some embodiments, the modified BoNT polypeptide comprises the amino acid sequence of any one of SEQ ID NOs: 187-194 having arginine substitutions at positions corresponding to K289, K291, K299, and K381 in SEQ ID NO: 1.

[0248] In some embodiments, the modified BoNT polypeptide is a modified protease domain of BoNT/A1 described herein. In some embodiments, the modified BoNT polypeptide comprises an amino acid sequence that is at least 70% (e.g., at least 70%, at least 75%, at least 80%, at least 85%, at least 90%, at least 95%, or at least 99%) identical to SEQ ID NO:1, and comprises arginine substitutions at positions corresponding to one or more of K212, K272, and K356 in SEQ ID NO: 1. In some embodiments, the modified BoNT polypeptide comprises an amino acid sequence that is at least 70% (e.g., at least 70%, at least 75%, at least 80%, at least 85%, at least 90%, at least 95%, or at least 99%) identical to SEQ ID NO:1, and comprises arginine substitutions at positions corresponding to K212, K272, and K356 in SEQ ID NO: 1. In some embodiments, the group of arginine substitutions at positions corresponding to K212, K272, and K356 in SEQ ID NO: 1 is referred to as Group 3. In some embodiments, the modified BoNT polypeptide comprises the amino acid sequence of SEQ ID NO: 109. In some embodiments, the modified BoNT polypeptide consists of the amino acid sequence of SEQ ID NO: 109.

[0249] In some embodiments, the modified BoNT polypeptide comprises a modified protease domain of BoNT/A1 and a translocation domain of BoNT/A1. In some embodiments, the modified BoNT polypeptide comprises an amino acid sequence that is at least 70% (e.g., at least 70%, at least 75%, at least 80%, at least 85%, at least 90%, at least 95%, or at least 99%) identical to SEQ ID NO:1, and comprises arginine substitutions a positions corresponding to one or more of K212, K272, and K356 in SEQ ID NO: 1. In some embodiments, the modified BoNT polypeptide comprises an amino acid sequence that is at least 70% (e.g., at least 70%, at least 75%, at least 80%, at least 85%, at least 90%, at least 95%, or at least 99%) identical to SEQ ID NO:1, and comprises arginine substitutions a positions corresponding to K212, K272, and K356 in SEQ ID NO: 1. In some embodiments, the modified BoNT polypeptide comprises the amino acid sequence of SEQ ID NO: 66. In some embodiments, the modified BoNT polypeptide consists of the amino acid sequence of SEQ ID NO: 66.

[0250] In some embodiments, the modified BoNT polypeptide is a full-length BoNT/A1 polypeptide comprising the modified protease domain of BoNT/A1 described herein. In some embodiments, the modified BoNT polypeptide comprises an amino acid sequence that is at least 70% (e.g., at least 70%, at least 75%, at least 80%, at least 85%, at least 90%, at least 95%, or at least 99%) identical to SEQ ID NO: 1, and comprises arginine substitutions at positions corresponding to one or more of K212, K272, and K356 in SEQ ID NO: 1. In some embodiments, the modified BoNT polypeptide comprises an amino acid sequence that is at least 70% (e.g., at least 70%, at least 75%, at least 80%, at least 85%, at least 90%, at least 95%, or at least 99%) identical to SEQ ID NO: 1, and comprises arginine substitutions at positions corresponding to K212, K272, and K356 in SEQ ID NO: 1. In some embodiments, the modified BoNT polypeptide comprises the amino acid sequence of SEQ ID NO: 23. In some embodiments, the modified BoNT polypeptide consists of the amino acid sequence of SEQ ID NO: 23.

[0251] In some embodiments, the modified BoNT polypeptide comprises a modified protease domain of BoNT/A1, a translocation domain of BoNT/A1, and a modified receptor binding domain of BoNT/A1. In some embodiments, the modified BoNT polypeptide comprises an amino acid sequence that is at least 70% (e.g., at least 70%, at least 75%, at least 80%, at least 85%, at least 90%, at least 95%, or at least 99%) identical to SEQ ID NO: 1, and comprises arginine substitutions a positions corresponding to one or more of K212, K272, and K356 in SEQ ID NO: 1 and one or more amino acid substitutions in the receptor binding domain at positions corresponding to 917, 953, 954, 955, 957, 968, 1025, 1026, 1052, 1062, 1063, 1064, 1065, 1066, 1145, 1156, 1232, 1272, 1278, 1288, 1289, 1292, 1294, and 1295 in SEQ ID NO: 1. In some embodiments, the modified BoNT polypeptide comprises an amino acid sequence that is at least 70% (e.g., at least 70%, at least 75%, at least 80%, at least 85%, at least 90%, at least 95%, or at least 99%) identical to SEQ ID NO: 1, and comprises arginine substitutions a positions corresponding to K212, K272, and K356 in SEQ ID NO: 1 and one or more amino acid substitutions in the receptor binding domain at positions corresponding to 917, 953, 954, 955, 957, 968, 1025, 1026, 1052, 1062, 1063, 1064, 1065, 1066, 1145, 1156, 1232, 1272, 1278, 1288, 1289, 1292, 1294, and 1295 in SEQ ID NO: 1. In some embodiments the one or more amino acid substitutions in the receptor binding domain correspond to one or more of F917R or F917K; F953H or F953Y; N954S; S955K; S957N, S957Q or S957Y; M968I; N1025T; N1026K; N1052K; D1062E; T1063P; H1064R or H1064Q; R1065N; Y1066R or Y1066K; T1145Y; R1156M or R1156I; T1232R or T1232K; E1272G; L1278F, L1278Y or L1278W; D1288E or D1288N; D1289Y; G1292R or G1292K; R1294S or R1294T; and P1295S or P1295T in SEQ ID NO: 1. In some embodiments, the receptor binding domain comprises an amino acid substitution at a position corresponding to 1156 or 1232 in SEQ ID NO: 1. In some embodiments, the receptor binding domain comprises an amino acid substitution that corresponds to R1156M or T1232R in SEQ ID NO: 1.

[0252] In some embodiments, the modified BoNT polypeptide comprises a modified protease domain of BoNT/A1, a translocation domain of BoNT/A1, and a modified receptor binding domain of BoNT/A2. In some embodiments, the modified BoNT polypeptide comprises an amino acid sequence that is at least 70% (e.g., at least 70%, at least 75%, at least 80%, at least 85%, at least 90%, at least 95%, or at least 99%) identical to SEQ ID NO: 78 fused to the amino acid sequence of any one of SEQ ID NO: 131-165 or 205, and comprises arginine substitutions at positions corresponding to one or more of K212, K272, and K356 in SEQ ID NO: 1 and one or more amino acid substitutions in the receptor binding domain at positions corresponding to 915, 923, 1090, 1103, 1117, 1156, 1170, 1227, 1254, 1255, or 1256 in SEQ ID NO: 35. In some embodiments, the modified BoNT polypeptide comprises an amino acid sequence that is at least 70% (e.g., at least 70%, at least 75%, at least 80%, at least 85%, at least 90%, at least 95%, or at least 99%) identical to SEQ ID NO: 66 fused to the amino acid sequence of any one of SEQ ID NO: 131-165 or 205, and comprising one or more amino acid substitutions in the receptor binding domain at positions corresponding to 915, 923, 1090, 1103, 1117, 1156, 1170, 1227, 1254, 1255, or 1256 in SEQ ID NO: 35. In some embodiments the one or more amino acid substitutions in the receptor binding domain correspond to one or more of K915Q, T923K, 51090N, N1103D, F1117Y, E1156M, E1170K, D1227N, L1254Q, Y1255G, or D1256N in SEQ ID NO: 35.

[0253] In some embodiments, the modified BoNT polypeptide is a chimeric BoNT comprising a receptor binding domain from a BoNT of a different serotype (e.g., BoNT/B, C, D, E, F, G, H, or EN) fused to a polypeptide comprising the translocation domain of BoNT/A1 and a modified protease domain of BoNT/A1 comprising arginine substitutions at positions corresponding to K212, K272, and K356 in SEQ ID NO: 1. In some embodiments, the modified BoNT polypeptide comprises a polypeptide comprising an amino acid sequence that is at least 70% (e.g., at least 70%, at least 75%, at least 80%, at least 85%, at least 90%, at least 95%, or at least 99%) identical to any one of SEQ ID NOs: 179-186, fused to a polypeptide comprising the translocation domain of BoNT/A1 and a modified protease domain of BoNT/A1 comprising arginine substitutions at positions corresponding to one or more of K212, K272, and K356 in SEQ ID NO: 1. In some embodiments, the modified BoNT polypeptide comprises a polypeptide comprising an amino acid sequence that is at least 70% (e.g., at least 70%, at least 75%, at least 80%, at least 85%, at least 90%, at least 95%, or at least 99%) identical to any one of SEQ ID NOs: 179-186, fused to a polypeptide comprising the translocation domain of BoNT/A1 and a modified protease domain of BoNT/A1 comprising arginine substitutions at positions corresponding to K212, K272, and K356 in SEQ ID NO: 1. In some embodiments, the modified BoNT polypeptide comprises a polypeptide comprising a receptor binding domain amino acid sequence that is at least 70% (e.g., at least 70%, at least 75%, at least 80%, at least 85%, at least 90%, at least 95%, or at least 99%) identical to any one of SEQ ID NOs: 179-186, fused to a polypeptide comprising an amino acid sequence that is at least 70% (e.g., at least 70%, at least 75%, at least 80%, at least 85%, at least 90%, at least 95%, or at least 99%) identical to SEQ ID NO: 44 and comprising arginine substitutions at positions corresponding to K212, K272, and K356 in SEQ ID NO: 1. In some embodiments, the modified BoNT polypeptide comprises a polypeptide comprising the amino acid sequence of any one of SEQ ID NOs: 179-186, fused to a polypeptide comprising the amino acid sequence of SEQ ID NO: 66. In some embodiments, the modified BoNT polypeptide comprises a polypeptide consisting of the amino acid sequence of any one of SEQ ID NOs: 179-186, fused to an amino acid sequence consisting of the amino acid sequence of SEQ ID NO: 66. In some embodiments, the modified BoNT polypeptide comprises the amino acid sequence of any one of SEQ ID NOs: 187-194 having arginine substitutions at positions corresponding to one or more of K212, K272, and K356 in SEQ ID NO: 1. In some embodiments, the modified BoNT polypeptide comprises the amino acid sequence of any one of SEQ ID NOs: 187-194 having arginine substitutions at positions corresponding to K212, K272, and K356 in SEQ ID NO: 1.

[0254] In some embodiments, the modified BoNT polypeptide is a modified protease domain of BoNT/A1 described herein. In some embodiments, the modified BoNT polypeptide comprises an amino acid sequence that is at least 70% (e.g., at least 70%, at least 75%, at least 80%, at least 85%, at least 90%, at least 95%, or at least 99%) identical to SEQ ID NO:1, and comprises arginine substitutions at positions corresponding to one or more of K11, K41, K318, K335, K337, K340, K343, K375, and K415 in SEQ ID NO: 1. In some embodiments, the modified BoNT polypeptide comprises an amino acid sequence that is at least 70% (e.g., at least 70%, at least 75%, at least 80%, at least 85%, at least 90%, at least 95%, or at least 99%) identical to SEQ ID NO:1, and comprises arginine substitutions at positions corresponding to K11, K41, K318, K335, K337, K340, K343, K375, and K415 in SEQ ID NO: 1. In some embodiments, the group of arginine substitutions at positions corresponding to K11, K41, K318, K335, K337, K340, K343, K375, and K415 in SEQ ID NO: 1 is referred to as KR9. In some embodiments, the modified BoNT polypeptide comprises the amino acid sequence of SEQ ID NO: 110. In some embodiments, the modified BoNT polypeptide consists of the amino acid sequence of SEQ ID NO: 110.

[0255] In some embodiments, the modified BoNT polypeptide comprises a modified protease domain of BoNT/A1 and a translocation domain of BoNT/A1. In some embodiments, the modified BoNT polypeptide comprises an amino acid sequence that is at least 70% (e.g., at least 70%, at least 75%, at least 80%, at least 85%, at least 90%, at least 95%, or at least 99%) identical to SEQ ID NO:1, and comprises arginine substitutions a positions corresponding to one or more of K11, K41, K318, K335, K337, K340, K343, K375, and K415 in SEQ ID NO: 1. In some embodiments, the modified BoNT polypeptide comprises an amino acid sequence that is at least 70% (e.g., at least 70%, at least 75%, at least 80%, at least 85%, at least 90%, at least 95%, or at least 99%) identical to SEQ ID NO:1, and comprises arginine substitutions a positions corresponding to K11, K41, K318, K335, K337, K340, K343, K375, and K415 in SEQ ID NO: 1. In some embodiments, the modified BoNT polypeptide comprises the amino acid sequence of SEQ ID NO: 67. In some embodiments, the modified BoNT polypeptide consists of the amino acid sequence of SEQ ID NO: 67.

[0256] In some embodiments, the modified BoNT polypeptide is a full-length BoNT/A1 polypeptide comprising the modified protease domain of BoNT/A1 described herein. In some embodiments, the modified BoNT polypeptide comprises an amino acid sequence that is at least 70% (e.g., at least 70%, at least 75%, at least 80%, at least 85%, at least 90%, at least 95%, or at least 99%) identical to SEQ ID NO: 1, and comprises arginine substitutions at positions corresponding to one or more of K11, K41, K318, K335, K337, K340, K343, K375, and K415 in SEQ ID NO: 1. In some embodiments, the modified BoNT polypeptide comprises an amino acid sequence that is at least 70% (e.g., at least 70%, at least 75%, at least 80%, at least 85%, at least 90%, at least 95%, or at least 99%) identical to SEQ ID NO: 1, and comprises arginine substitutions at positions corresponding to K11, K41, K318, K335, K337, K340, K343, K375, and K415 in SEQ ID NO: 1. In some embodiments, the modified BoNT polypeptide comprises the amino acid sequence of SEQ ID NO: 24. In some embodiments, the modified BoNT polypeptide consists of the amino acid sequence of SEQ ID NO: 24.

[0257] In some embodiments, the modified BoNT polypeptide comprises a modified protease domain of BoNT/A1, a translocation domain of BoNT/A1, and a modified receptor binding domain of BoNT/A1. In some embodiments, the modified BoNT polypeptide comprises an amino acid sequence that is at least 70% (e.g., at least 70%, at least 75%, at least 80%, at least 85%, at least 90%, at least 95%, or at least 99%) identical to SEQ ID NO: 1, and comprises arginine substitutions a positions corresponding to one or more of K11, K41, K318, K335, K337, K340, K343, K375, and K415 in SEQ ID NO: 1 and one or more amino acid substitutions in the receptor binding domain at positions corresponding to 917, 953, 954, 955, 957, 968, 1025, 1026, 1052, 1062, 1063, 1064, 1065, 1066, 1145, 1156, 1232, 1272, 1278, 1288, 1289, 1292, 1294, and 1295 in SEQ ID NO: 1. In some embodiments, the modified BoNT polypeptide comprises an amino acid sequence that is at least 70% (e.g., at least 70%, at least 75%, at least 80%, at least 85%, at least 90%, at least 95%, or at least 99%) identical to SEQ ID NO: 1, and comprises arginine substitutions a positions corresponding to K11, K41, K318, K335, K337, K340, K343, K375, and K415 in SEQ ID NO: 1 and one or more amino acid substitutions in the receptor binding domain at positions corresponding to 917, 953, 954, 955, 957, 968, 1025, 1026, 1052, 1062, 1063, 1064, 1065, 1066, 1145, 1156, 1232, 1272, 1278, 1288, 1289, 1292, 1294, and 1295 in SEQ ID NO: 1. In some embodiments the one or more amino acid substitutions in the receptor binding domain correspond to one or more of F917R or F917K; F953H or F953Y; N954S; S955K; S957N, S957Q or S957Y; M968I; N1025T; N1026K; N1052K; D1062E; T1063P; H1064R or H1064Q; R1065N; Y1066R or Y1066K; T1145Y; R1156M or R1156I; T1232R or T1232K; E1272G; L1278F, L1278Y or L1278W; D1288E or D1288N; D1289Y; G1292R or G1292K; R1294S or R1294T; and P1295S or P1295T in SEQ ID NO: 1. In some embodiments, the receptor binding domain comprises an amino acid substitution at a position corresponding to 1156 or 1232 in SEQ ID NO: 1. In some embodiments, the receptor binding domain comprises an amino acid substitution that corresponds to R1156M or T1232R in SEQ ID NO: 1.

[0258] In some embodiments, the modified BoNT polypeptide comprises a modified protease domain of BoNT/A1, a translocation domain of BoNT/A1, and a modified receptor binding domain of BoNT/A2. In some embodiments, the modified BoNT polypeptide comprises an amino acid sequence that is at least 70% (e.g., at least 70%, at least 75%, at least 80%, at least 85%, at least 90%, at least 95%, or at least 99%) identical to SEQ ID NO: 78 fused to the amino acid sequence of any one of SEQ ID NO: 131-165 or 205, and comprises arginine substitutions at positions corresponding to one or more of K11, K41, K318, K335, K337, K340, K343, K375, and K415 in SEQ ID NO: 1 and one or more amino acid substitutions in the receptor binding domain at positions corresponding to 915, 923, 1090, 1103, 1117, 1156, 1170, 1227, 1254, 1255, or 1256 in SEQ ID NO: 35. In some embodiments, the modified BoNT polypeptide comprises an amino acid sequence that is at least 70% (e.g., at least 70%, at least 75%, at least 80%, at least 85%, at least 90%, at least 95%, or at least 99%) identical to SEQ ID NO: 67 fused to the amino acid sequence of any one of SEQ ID NO: 131-165 or 205, and comprising one or more amino acid substitutions in the receptor binding domain at positions corresponding to 915, 923, 1090, 1103, 1117, 1156, 1170, 1227, 1254, 1255, or 1256 in SEQ ID NO: 35. In some embodiments the one or more amino acid substitutions in the receptor binding domain correspond to one or more of K915Q, T923K, S1090N, N1103D, F1117Y, E1156M, E1170K, D1227N, L1254Q, Y1255G, or D1256N in SEQ ID NO: 35.

[0259] In some embodiments, the modified BoNT polypeptide is a chimeric BoNT comprising a receptor binding domain from a BoNT of a different serotype (e.g., BoNT/B, C, D, E, F, G, H, or EN) fused to a polypeptide comprising the translocation domain of BoNT/A1 and a modified protease domain of BoNT/A1 comprising arginine substitutions at positions corresponding to K11, K41, K318, K335, K337, K340, K343, K375, and K415 in SEQ ID NO: 1. In some embodiments, the modified BoNT polypeptide comprises a polypeptide comprising an amino acid sequence that is at least 70% (e.g., at least 70%, at least 75%, at least 80%, at least 85%, at least 90%, at least 95%, or at least 99%) identical to any one of SEQ ID NOs: 179-186, fused to a polypeptide comprising the translocation domain of BoNT/A1 and a modified protease domain of BoNT/A1 comprising arginine substitutions at positions corresponding to one or more of K11, K41, K318, K335, K337, K340, K343, K375, and K415 in SEQ ID NO: 1. In some embodiments, the modified BoNT polypeptide comprises a polypeptide comprising an amino acid sequence that is at least 70% (e.g., at least 70%, at least 75%, at least 80%, at least 85%, at least 90%, at least 95%, or at least 99%) identical to any one of SEQ ID NOs: 179-186, fused to a polypeptide comprising the translocation domain of BoNT/A1 and a modified protease domain of BoNT/A1 comprising arginine substitutions at positions corresponding to K11, K41, K318, K335, K337, K340, K343, K375, and K415 in SEQ ID NO: 1. In some embodiments, the modified BoNT polypeptide comprises a polypeptide comprising a receptor binding domain amino acid sequence that is at least 70% (e.g., at least 70%, at least 75%, at least 80%, at least 85%, at least 90%, at least 95%, or at least 99%) identical to any one of SEQ ID NOs: 179-186, fused to a polypeptide comprising an amino acid sequence that is at least 70% (e.g., at least 70%, at least 75%, at least 80%, at least 85%, at least 90%, at least 95%, or at least 99%) identical to SEQ ID NO: 44 and comprising arginine substitutions at positions corresponding to K11, K41, K318, K335, K337, K340, K343, K375, and K415 in SEQ ID NO: 1. In some embodiments, the modified BoNT polypeptide comprises a polypeptide comprising the amino acid sequence of any one of SEQ ID NOs: 179-186, fused to a polypeptide comprising the amino acid sequence of SEQ ID NO: 67. In some embodiments, the modified BoNT polypeptide comprises a polypeptide consisting of the amino acid sequence of any one of SEQ ID NOs: 179-186, fused to an amino acid sequence consisting of the amino acid sequence of SEQ ID NO: 67. In some embodiments, the modified BoNT polypeptide comprises the amino acid sequence of any one of SEQ ID NOs: 187-194 having arginine substitutions at positions corresponding to one or more of K11, K41, K318, K335, K337, K340, K343, K375, and K415 in SEQ ID NO: 1. In some embodiments, the modified BoNT polypeptide comprises the amino acid sequence of any one of SEQ ID NOs: 187-194 having arginine substitutions at positions corresponding to K11, K41, K318, K335, K337, K340, K343, K375, and K415 in SEQ ID NO: 1.

[0260] In some embodiments, the modified BoNT polypeptide is a modified protease domain of BoNT/A1 described herein. In some embodiments, the modified BoNT polypeptide comprises an amino acid sequence that is at least 70% (e.g., at least 70%, at least 75%, at least 80%, at least 85%, at least 90%, at least 95%, or at least 99%) identical to SEQ ID NO:1, and comprises arginine substitutions at positions corresponding to one or more of K11, K289, K291, K299, K335, K337, K343, K375, K381, and K415 in SEQ ID NO: 1. In some embodiments, the modified BoNT polypeptide comprises an amino acid sequence that is at least 70% (e.g., at least 70%, at least 75%, at least 80%, at least 85%, at least 90%, at least 95%, or at least 99%) identical to SEQ ID NO:1, and comprises arginine substitutions at positions corresponding to K11, K289, K291, K299, K335, K337, K343, K375, K381, and K415 in SEQ ID NO: 1. In some embodiments, the group of arginine substitutions at positions corresponding to K11, K289, K291, K299, K335, K337, K343, K375, K381, and K415 in SEQ ID NO: 1 is referred to as KR10. In some embodiments, the modified BoNT polypeptide comprises the amino acid sequence of SEQ ID NO: 111. In some embodiments, the modified BoNT polypeptide consists of the amino acid sequence of SEQ ID NO: 111.

[0261] In some embodiments, the modified BoNT polypeptide comprises a modified protease domain of BoNT/A1 and a translocation domain of BoNT/A1. In some embodiments, the modified BoNT polypeptide comprises an amino acid sequence that is at least 70% (e.g., at least 70%, at least 75%, at least 80%, at least 85%, at least 90%, at least 95%, or at least 99%) identical to SEQ ID NO:1, and comprises arginine substitutions a positions corresponding to one or more of K11, K289, K291, K299, K335, K337, K343, K375, K381, and K415 in SEQ ID NO: 1. In some embodiments, the modified BoNT polypeptide comprises an amino acid sequence that is at least 70% (e.g., at least 70%, at least 75%, at least 80%, at least 85%, at least 90%, at least 95%, or at least 99%) identical to SEQ ID NO:1, and comprises arginine substitutions a positions corresponding to K11, K289, K291, K299, K335, K337, K343, K375, K381, and K415 in SEQ ID NO: 1. In some embodiments, the modified BoNT polypeptide comprises the amino acid sequence of SEQ ID NO: 68. In some embodiments, the modified BoNT polypeptide consists of the amino acid sequence of SEQ ID NO: 68.

[0262] In some embodiments, the modified BoNT polypeptide is a full-length BoNT/A1 polypeptide comprising the modified protease domain of BoNT/A1 described herein. In some embodiments, the modified BoNT polypeptide comprises an amino acid sequence that is at least 70% (e.g., at least 70%, at least 75%, at least 80%, at least 85%, at least 90%, at least 95%, or at least 99%) identical to SEQ ID NO: 1, and comprises arginine substitutions at positions corresponding to one or more of K11, K289, K291, K299, K335, K337, K343, K375, K381, and K415 in SEQ ID NO: 1. In some embodiments, the modified BoNT polypeptide comprises an amino acid sequence that is at least 70% (e.g., at least 70%, at least 75%, at least 80%, at least 85%, at least 90%, at least 95%, or at least 99%) identical to SEQ ID NO: 1, and comprises arginine substitutions at positions corresponding to K11, K289, K291, K299, K335, K337, K343, K375, K381, and K415 in SEQ ID NO: 1. In some embodiments, the modified BoNT polypeptide comprises the amino acid sequence of SEQ ID NO: 25. In some embodiments, the modified BoNT polypeptide consists of the amino acid sequence of SEQ ID NO: 25.

[0263] In some embodiments, the modified BoNT polypeptide comprises a modified protease domain of BoNT/A1, a translocation domain of BoNT/A1, and a modified receptor binding domain of BoNT/A1. In some embodiments, the modified BoNT polypeptide comprises an amino acid sequence that is at least 70% (e.g., at least 70%, at least 75%, at least 80%, at least 85%, at least 90%, at least 95%, or at least 99%) identical to SEQ ID NO: 1, and comprises arginine substitutions a positions corresponding to one or more of K11, K289, K291, K299, K335, K337, K343, K375, K381, and K415 in SEQ ID NO: 1 and one or more amino acid substitutions in the receptor binding domain at positions corresponding to 917, 953, 954, 955, 957, 968, 1025, 1026, 1052, 1062, 1063, 1064, 1065, 1066, 1145, 1156, 1232, 1272, 1278, 1288, 1289, 1292, 1294, and 1295 in SEQ ID NO: 1. In some embodiments, the modified BoNT polypeptide comprises an amino acid sequence that is at least 70% (e.g., at least 70%, at least 75%, at least 80%, at least 85%, at least 90%, at least 95%, or at least 99%) identical to SEQ ID NO: 1, and comprises arginine substitutions a positions corresponding to K11, K289, K291, K299, K335, K337, K343, K375, K381, and K415 in SEQ ID NO: 1 and one or more amino acid substitutions in the receptor binding domain at positions corresponding to 917, 953, 954, 955, 957, 968, 1025, 1026, 1052, 1062, 1063, 1064, 1065, 1066, 1145, 1156, 1232, 1272, 1278, 1288, 1289, 1292, 1294, and 1295 in SEQ ID NO: 1. In some embodiments the one or more amino acid substitutions in the receptor binding domain correspond to one or more of F917R or F917K; F953H or F953Y; N954S; S955K; S957N, S957Q or S957Y; M968I; N1025T; N1026K; N1052K; D1062E; T1063P; H1064R or H1064Q; R1065N; Y1066R or Y1066K; T1145Y; R1156M or R1156I; T1232R or T1232K; E1272G; L1278F, L1278Y or L1278W; D1288E or D1288N; D1289Y; G1292R or G1292K; R1294S or R1294T; and P1295S or P1295T in SEQ ID NO: 1. In some embodiments, the receptor binding domain comprises an amino acid substitution at a position corresponding to 1156 or 1232 in SEQ ID NO: 1. In some embodiments, the receptor binding domain comprises an amino acid substitution that corresponds to R1156M or T1232R in SEQ ID NO: 1.

[0264] In some embodiments, the modified BoNT polypeptide comprises a modified protease domain of BoNT/A1, a translocation domain of BoNT/A1, and a modified receptor binding domain of BoNT/A2. In some embodiments, the modified BoNT polypeptide comprises an amino acid sequence that is at least 70% (e.g., at least 70%, at least 75%, at least 80%, at least 85%, at least 90%, at least 95%, or at least 99%) identical to SEQ ID NO: 78 fused to the amino acid sequence of any one of SEQ ID NO: 131-165 or 205, and comprises arginine substitutions at positions corresponding to one or more of K11, K289, K291, K299, K335, K337, K343, K375, K381, and K415 in SEQ ID NO: 1 and one or more amino acid substitutions in the receptor binding domain at positions corresponding to 915, 923, 1090, 1103, 1117, 1156, 1170, 1227, 1254, 1255, or 1256 in SEQ ID NO: 35. In some embodiments, the modified BoNT polypeptide comprises an amino acid sequence that is at least 70% (e.g., at least 70%, at least 75%, at least 80%, at least 85%, at least 90%, at least 95%, or at least 99%) identical to SEQ ID NO: 68 fused to the amino acid sequence of any one of SEQ ID NO: 131-165 or 205, and comprising one or more amino acid substitutions in the receptor binding domain at positions corresponding to 915, 923, 1090, 1103, 1117, 1156, 1170, 1227, 1254, 1255, or 1256 in SEQ ID NO: 35. In some embodiments the one or more amino acid substitutions in the receptor binding domain correspond to one or more of K915Q, T923K, 51090N, N1103D, F1117Y, E1156M, E1170K, D1227N, L1254Q, Y1255G, or D1256N in SEQ ID NO: 35.

[0265] In some embodiments, the modified BoNT polypeptide is a chimeric BoNT comprising a receptor binding domain from a BoNT of a different serotype (e.g., BoNT/B, C, D, E, F, G, H, or EN) fused to a polypeptide comprising the translocation domain of BoNT/A1 and a modified protease domain of BoNT/A1 comprising arginine substitutions at positions corresponding to K11, K289, K291, K299, K335, K337, K343, K375, K381, and K415 in SEQ ID NO: 1. In some embodiments, the modified BoNT polypeptide comprises a polypeptide comprising an amino acid sequence that is at least 70% (e.g., at least 70%, at least 75%, at least 80%, at least 85%, at least 90%, at least 95%, or at least 99%) identical to any one of SEQ ID NOs: 179-186, fused to a polypeptide comprising the translocation domain of BoNT/A1 and a modified protease domain of BoNT/A1 comprising arginine substitutions at positions corresponding to one or more of K11, K289, K291, K299, K335, K337, K343, K375, K381, and K415 in SEQ ID NO: 1. In some embodiments, the modified BoNT polypeptide comprises a polypeptide comprising an amino acid sequence that is at least 70% (e.g., at least 70%, at least 75%, at least 80%, at least 85%, at least 90%, at least 95%, or at least 99%) identical to any one of SEQ ID NOs: 179-186, fused to a polypeptide comprising the translocation domain of BoNT/A1 and a modified protease domain of BoNT/A1 comprising arginine substitutions at positions corresponding to K11, K289, K291, K299, K335, K337, K343, K375, K381, and K415 in SEQ ID NO: 1. In some embodiments, the modified BoNT polypeptide comprises a polypeptide comprising a receptor binding domain amino acid sequence that is at least 70% (e.g., at least 70%, at least 75%, at least 80%, at least 85%, at least 90%, at least 95%, or at least 99%) identical to any one of SEQ ID NOs: 179-186, fused to a polypeptide comprising an amino acid sequence that is at least 70% (e.g., at least 70%, at least 75%, at least 80%, at least 85%, at least 90%, at least 95%, or at least 99%) identical to SEQ ID NO: 44 and comprising arginine substitutions at positions corresponding to K11, K289, K291, K299, K335, K337, K343, K375, K381, and K415 in SEQ ID NO: 1. In some embodiments, the modified BoNT polypeptide comprises a polypeptide comprising the amino acid sequence of any one of SEQ ID NOs: 179-186, fused to a polypeptide comprising the amino acid sequence of SEQ ID NO: 68. In some embodiments, the modified BoNT polypeptide comprises a polypeptide consisting of the amino acid sequence of any one of SEQ ID NOs: 179-186, fused to an amino acid sequence consisting of the amino acid sequence of SEQ ID NO: 68. In some embodiments, the modified BoNT polypeptide comprises the amino acid sequence of any one of SEQ ID NOs: 187-194 having arginine substitutions at positions corresponding to one or more of K11, K289, K291, K299, K335, K337, K343, K375, K381, and K415 in SEQ ID NO: 1. In some embodiments, the modified BoNT polypeptide comprises the amino acid sequence of any one of SEQ ID NOs: 187-194 having arginine substitutions at positions corresponding to K11, K289, K291, K299, K335, K337, K343, K375, K381, and K415 in SEQ ID NO: 1.

[0266] In some embodiments, the modified BoNT polypeptide comprises a polypeptide comprising an amino acid sequence that is at least 70% (e.g., at least 70%, at least 75%, at least 80%, at least 85%, at least 90%, at least 95%, or at least 99%) identical to SEQ ID NO: 203 or SEQ ID NO: 217. In some embodiments, the modified BoNT polypeptide comprises a polypeptide comprising an amino acid sequence of SEQ ID NO: 203 or SEQ ID NO: 217. In some embodiments, the modified BoNT polypeptide comprises a polypeptide consisting of an amino acid sequence of SEQ ID NO: 203 or SEQ ID NO: 217.

[0267] In some embodiments, the modified BoNT polypeptide is a modified protease domain of BoNT/A1 described herein. In some embodiments, the modified BoNT polypeptide comprises an amino acid sequence that is at least 70% (e.g., at least 70%, at least 75%, at least 80%, at least 85%, at least 90%, at least 95%, or at least 99%) identical to SEQ ID NO:1, and comprises arginine substitutions at positions corresponding to one or more of K11, K41, K289, K291, K299, K335, K337, K343, K375, K381, and K415 in SEQ ID NO: 1. In some embodiments, the modified BoNT polypeptide comprises an amino acid sequence that is at least 70% (e.g., at least 70%, at least 75%, at least 80%, at least 85%, at least 90%, at least 95%, or at least 99%) identical to SEQ ID NO:1, and comprises arginine substitutions at positions corresponding to K11, K41, K289, K291, K299, K335, K337, K343, K375, K381, and K415 in SEQ ID NO: 1. In some embodiments, the group of arginine substitutions at positions corresponding to K11, K41, K289, K291, K299, K335, K337, K343, K375, K381, and K415 in SEQ ID NO: 1 is referred to as KR11-41. In some embodiments, the modified BoNT polypeptide comprises the amino acid sequence of SEQ ID NO: 112. In some embodiments, the modified BoNT polypeptide consists of the amino acid sequence of SEQ ID NO: 112.

[0268] In some embodiments, the modified BoNT polypeptide comprises a modified protease domain of BoNT/A1 and a translocation domain of BoNT/A1. In some embodiments, the modified BoNT polypeptide comprises an amino acid sequence that is at least 70% (e.g., at least 70%, at least 75%, at least 80%, at least 85%, at least 90%, at least 95%, or at least 99%) identical to SEQ ID NO:1, and comprises arginine substitutions a positions corresponding to one or more of K11, K41, K289, K291, K299, K335, K337, K343, K375, K381, and K415 in SEQ ID NO: 1. In some embodiments, the modified BoNT polypeptide comprises an amino acid sequence that is at least 70% (e.g., at least 70%, at least 75%, at least 80%, at least 85%, at least 90%, at least 95%, or at least 99%) identical to SEQ ID NO:1, and comprises arginine substitutions a positions corresponding to K11, K41, K289, K291, K299, K335, K337, K343, K375, K381, and K415 in SEQ ID NO: 1. In some embodiments, the modified BoNT polypeptide comprises the amino acid sequence of SEQ ID NO: 69. In some embodiments, the modified BoNT polypeptide consists of the amino acid sequence of SEQ ID NO: 69.

[0269] In some embodiments, the modified BoNT polypeptide is a full-length BoNT/A1 polypeptide comprising the modified protease domain of BoNT/A1 described herein. In some embodiments, the modified BoNT polypeptide comprises an amino acid sequence that is at least 70% (e.g., at least 70%, at least 75%, at least 80%, at least 85%, at least 90%, at least 95%, or at least 99%) identical to SEQ ID NO: 1, and comprises arginine substitutions at positions corresponding to one or more of K11, K41, K289, K291, K299, K335, K337, K343, K375, K381, and K415 in SEQ ID NO: 1. In some embodiments, the modified BoNT polypeptide comprises an amino acid sequence that is at least 70% (e.g., at least 70%, at least 75%, at least 80%, at least 85%, at least 90%, at least 95%, or at least 99%) identical to SEQ ID NO: 1, and comprises arginine substitutions at positions corresponding to K11, K41, K289, K291, K299, K335, K337, K343, K375, K381, and K415 in SEQ ID NO: 1. In some embodiments, the modified BoNT polypeptide comprises the amino acid sequence of SEQ ID NO: 26. In some embodiments, the modified BoNT polypeptide consists of the amino acid sequence of SEQ ID NO: 26.

[0270] In some embodiments, the modified BoNT polypeptide comprises a modified protease domain of BoNT/A1, a translocation domain of BoNT/A1, and a modified receptor binding domain of BoNT/A1. In some embodiments, the modified BoNT polypeptide comprises an amino acid sequence that is at least 70% (e.g., at least 70%, at least 75%, at least 80%, at least 85%, at least 90%, at least 95%, or at least 99%) identical to SEQ ID NO: 1, and comprises arginine substitutions a positions corresponding to one or more of K11, K41, K289, K291, K299, K335, K337, K343, K375, K381, and K415 in SEQ ID NO: 1 and one or more amino acid substitutions in the receptor binding domain at positions corresponding to 917, 953, 954, 955, 957, 968, 1025, 1026, 1052, 1062, 1063, 1064, 1065, 1066, 1145, 1156, 1232, 1272, 1278, 1288, 1289, 1292, 1294, and 1295 in SEQ ID NO: 1. In some embodiments, the modified BoNT polypeptide comprises an amino acid sequence that is at least 70% (e.g., at least 70%, at least 75%, at least 80%, at least 85%, at least 90%, at least 95%, or at least 99%) identical to SEQ ID NO: 1, and comprises arginine substitutions a positions corresponding to K11, K41, K289, K291, K299, K335, K337, K343, K375, K381, and K415 in SEQ ID NO: 1 and one or more amino acid substitutions in the receptor binding domain at positions corresponding to 917, 953, 954, 955, 957, 968, 1025, 1026, 1052, 1062, 1063, 1064, 1065, 1066, 1145, 1156, 1232, 1272, 1278, 1288, 1289, 1292, 1294, and 1295 in SEQ ID NO: 1. In some embodiments the one or more amino acid substitutions in the receptor binding domain correspond to one or more of F917R or F917K; F953H or F953Y; N954S; S955K; S957N, S957Q or S957Y; M968I; N1025T; N1026K; N1052K; D1062E; T1063P; H1064R or H1064Q; R1065N; Y1066R or Y1066K; T1145Y; R1156M or R1156I; T1232R or T1232K; E1272G; L1278F, L1278Y or L1278W; D1288E or D1288N; D1289Y; G1292R or G1292K; R1294S or R1294T; and P1295S or P1295T in SEQ ID NO: 1. In some embodiments, the receptor binding domain comprises an amino acid substitution at a position corresponding to 1156 or 1232 in SEQ ID NO: 1. In some embodiments, the receptor binding domain comprises an amino acid substitution that corresponds to R1156M or T1232R in SEQ ID NO: 1.

[0271] In some embodiments, the modified BoNT polypeptide comprises a modified protease domain of BoNT/A1, a translocation domain of BoNT/A1, and a modified receptor binding domain of BoNT/A2. In some embodiments, the modified BoNT polypeptide comprises an amino acid sequence that is at least 70% (e.g., at least 70%, at least 75%, at least 80%, at least 85%, at least 90%, at least 95%, or at least 99%) identical to SEQ ID NO: 78 fused to the amino acid sequence of any one of SEQ ID NO: 131-165 or 205, and comprises arginine substitutions at positions corresponding to one or more of K11, K41, K289, K291, K299, K335, K337, K343, K375, K381, and K415 in SEQ ID NO: 1 and one or more amino acid substitutions in the receptor binding domain at positions corresponding to 915, 923, 1090, 1103, 1117, 1156, 1170, 1227, 1254, 1255, or 1256 in SEQ ID NO: 35. In some embodiments, the modified BoNT polypeptide comprises an amino acid sequence that is at least 70% (e.g., at least 70%, at least 75%, at least 80%, at least 85%, at least 90%, at least 95%, or at least 99%) identical to SEQ ID NO: 69 fused to the amino acid sequence of any one of SEQ ID NO: 131-165 or 205, and comprising one or more amino acid substitutions in the receptor binding domain at positions corresponding to 915, 923, 1090, 1103, 1117, 1156, 1170, 1227, 1254, 1255, or 1256 in SEQ ID NO: 35. In some embodiments the one or more amino acid substitutions in the receptor binding domain correspond to one or more of K915Q, T923K, 51090N, N1103D, F1117Y, E1156M, E1170K, D1227N, L1254Q, Y1255G, or D1256N in SEQ ID NO: 35.

[0272] In some embodiments, the modified BoNT polypeptide is a chimeric BoNT comprising a receptor binding domain from a BoNT of a different serotype (e.g., BoNT/B, C, D, E, F, G, H, or EN) fused to a polypeptide comprising the translocation domain of BoNT/A1 and a modified protease domain of BoNT/A1 comprising arginine substitutions at positions corresponding to K11, K41, K289, K291, K299, K335, K337, K343, K375, K381, and K415 in SEQ ID NO: 1. In some embodiments, the modified BoNT polypeptide comprises a polypeptide comprising an amino acid sequence that is at least 70% (e.g., at least 70%, at least 75%, at least 80%, at least 85%, at least 90%, at least 95%, or at least 99%) identical to any one of SEQ ID NOs: 179-186, fused to a polypeptide comprising the translocation domain of BoNT/A1 and a modified protease domain of BoNT/A1 comprising arginine substitutions at positions corresponding to one or more of K11, K41, K289, K291, K299, K335, K337, K343, K375, K381, and K415 in SEQ ID NO: 1. In some embodiments, the modified BoNT polypeptide comprises a polypeptide comprising an amino acid sequence that is at least 70% (e.g., at least 70%, at least 75%, at least 80%, at least 85%, at least 90%, at least 95%, or at least 99%) identical to any one of SEQ ID NOs: 179-186, fused to a polypeptide comprising the translocation domain of BoNT/A1 and a modified protease domain of BoNT/A1 comprising arginine substitutions at positions corresponding to K11, K41, K289, K291, K299, K335, K337, K343, K375, K381, and K415 in SEQ ID NO: 1. In some embodiments, the modified BoNT polypeptide comprises a polypeptide comprising a receptor binding domain amino acid sequence that is at least 70% (e.g., at least 70%, at least 75%, at least 80%, at least 85%, at least 90%, at least 95%, or at least 99%) identical to any one of SEQ ID NOs: 179-186, fused to a polypeptide comprising an amino acid sequence that is at least 70% (e.g., at least 70%, at least 75%, at least 80%, at least 85%, at least 90%, at least 95%, or at least 99%) identical to SEQ ID NO: 44 and comprising arginine substitutions at positions corresponding to K11, K41, K289, K291, K299, K335, K337, K343, K375, K381, and K415 in SEQ ID NO: 1. In some embodiments, the modified BoNT polypeptide comprises a polypeptide comprising the amino acid sequence of any one of SEQ ID NOs: 179-186, fused to a polypeptide comprising the amino acid sequence of SEQ ID NO: 69. In some embodiments, the modified BoNT polypeptide comprises a polypeptide consisting of the amino acid sequence of any one of SEQ ID NOs: 179-186, fused to an amino acid sequence consisting of the amino acid sequence of SEQ ID NO: 69. In some embodiments, the modified BoNT polypeptide comprises the amino acid sequence of any one of SEQ ID NOs: 187-194 having arginine substitutions at positions corresponding to one or more of K11, K41, K289, K291, K299, K335, K337, K343, K375, K381, and K415 in SEQ ID NO: 1. In some embodiments, the modified BoNT polypeptide comprises the amino acid sequence of any one of SEQ ID NOs: 187-194 having arginine substitutions at positions corresponding to K11, K41, K289, K291, K299, K335, K337, K343, K375, K381, and K415 in SEQ ID NO: 1.

[0273] In some embodiments, the modified BoNT polypeptide is a modified protease domain of BoNT/A1 described herein. In some embodiments, the modified BoNT polypeptide comprises an amino acid sequence that is at least 70% (e.g., at least 70%, at least 75%, at least 80%, at least 85%, at least 90%, at least 95%, or at least 99%) identical to SEQ ID NO:1, and comprises arginine substitutions at positions corresponding to one or more of K11, K212, K289, K291, K299, K335, K337, K343, K375, K381, and K415 in SEQ ID NO: 1. In some embodiments, the modified BoNT polypeptide comprises an amino acid sequence that is at least 70% (e.g., at least 70%, at least 75%, at least 80%, at least 85%, at least 90%, at least 95%, or at least 99%) identical to SEQ ID NO:1, and comprises arginine substitutions at positions corresponding to K11, K212, K289, K291, K299, K335, K337, K343, K375, K381, and K415 in SEQ ID NO: 1. In some embodiments, the group of arginine substitutions at positions corresponding to K11, K212, K289, K291, K299, K335, K337, K343, K375, K381, and K415 in SEQ ID NO: 1 is referred to as KR11-212. In some embodiments, the modified BoNT polypeptide comprises the amino acid sequence of SEQ ID NO: 113. In some embodiments, the modified BoNT polypeptide consists of the amino acid sequence of SEQ ID NO: 113.

[0274] In some embodiments, the modified BoNT polypeptide comprises a modified protease domain of BoNT/A1 and a translocation domain of BoNT/A1. In some embodiments, the modified BoNT polypeptide comprises an amino acid sequence that is at least 70% (e.g., at least 70%, at least 75%, at least 80%, at least 85%, at least 90%, at least 95%, or at least 99%) identical to SEQ ID NO:1, and comprises arginine substitutions a positions corresponding to one or more of K11, K212, K289, K291, K299, K335, K337, K343, K375, K381, and K415 in SEQ ID NO: 1. In some embodiments, the modified BoNT polypeptide comprises an amino acid sequence that is at least 70% (e.g., at least 70%, at least 75%, at least 80%, at least 85%, at least 90%, at least 95%, or at least 99%) identical to SEQ ID NO:1, and comprises arginine substitutions a positions corresponding to K11, K212, K289, K291, K299, K335, K337, K343, K375, K381, and K415 in SEQ ID NO: 1. In some embodiments, the modified BoNT polypeptide comprises the amino acid sequence of SEQ ID NO: 70. In some embodiments, the modified BoNT polypeptide consists of the amino acid sequence of SEQ ID NO: 70.

[0275] In some embodiments, the modified BoNT polypeptide is a full-length BoNT/A1 polypeptide comprising the modified protease domain of BoNT/A1 described herein. In some embodiments, the modified BoNT polypeptide comprises an amino acid sequence that is at least 70% (e.g., at least 70%, at least 75%, at least 80%, at least 85%, at least 90%, at least 95%, or at least 99%) identical to SEQ ID NO: 1, and comprises arginine substitutions at positions corresponding to one or more of K11, K212, K289, K291, K299, K335, K337, K343, K375, K381, and K415 in SEQ ID NO: 1. In some embodiments, the modified BoNT polypeptide comprises an amino acid sequence that is at least 70% (e.g., at least 70%, at least 75%, at least 80%, at least 85%, at least 90%, at least 95%, or at least 99%) identical to SEQ ID NO: 1, and comprises arginine substitutions at positions corresponding to K11, K212, K289, K291, K299, K335, K337, K343, K375, K381, and K415 in SEQ ID NO: 1. In some embodiments, the modified BoNT polypeptide comprises the amino acid sequence of SEQ ID NO: 27. In some embodiments, the modified BoNT polypeptide consists of the amino acid sequence of SEQ ID NO: 27.

[0276] In some embodiments, the modified BoNT polypeptide comprises a modified protease domain of BoNT/A1, a translocation domain of BoNT/A1, and a modified receptor binding domain of BoNT/A1. In some embodiments, the modified BoNT polypeptide comprises an amino acid sequence that is at least 70% (e.g., at least 70%, at least 75%, at least 80%, at least 85%, at least 90%, at least 95%, or at least 99%) identical to SEQ ID NO: 1, and comprises arginine substitutions a positions corresponding to one or more of K11, K212, K289, K291, K299, K335, K337, K343, K375, K381, and K415 in SEQ ID NO: 1 and one or more amino acid substitutions in the receptor binding domain at positions corresponding to 917, 953, 954, 955, 957, 968, 1025, 1026, 1052, 1062, 1063, 1064, 1065, 1066, 1145, 1156, 1232, 1272, 1278, 1288, 1289, 1292, 1294, and 1295 in SEQ ID NO: 1. In some embodiments, the modified BoNT polypeptide comprises an amino acid sequence that is at least 70% (e.g., at least 70%, at least 75%, at least 80%, at least 85%, at least 90%, at least 95%, or at least 99%) identical to SEQ ID NO: 1, and comprises arginine substitutions a positions corresponding to K11, K212, K289, K291, K299, K335, K337, K343, K375, K381, and K415 in SEQ ID NO: 1 and one or more amino acid substitutions in the receptor binding domain at positions corresponding to 917, 953, 954, 955, 957, 968, 1025, 1026, 1052, 1062, 1063, 1064, 1065, 1066, 1145, 1156, 1232, 1272, 1278, 1288, 1289, 1292, 1294, and 1295 in SEQ ID NO: 1. In some embodiments the one or more amino acid substitutions in the receptor binding domain correspond to one or more of F917R or F917K; F953H or F953Y; N954S; S955K; S957N, S957Q or S957Y; M968I; N1025T; N1026K; N1052K; D1062E; T1063P; H1064R or H1064Q; R1065N; Y1066R or Y1066K; T1145Y; R1156M or R1156I; T1232R or T1232K; E1272G; L1278F, L1278Y or L1278W; D1288E or D1288N; D1289Y; G1292R or G1292K; R1294S or R1294T; and P1295S or P1295T in SEQ ID NO: 1. In some embodiments, the receptor binding domain comprises an amino acid substitution at a position corresponding to 1156 or 1232 in SEQ ID NO: 1. In some embodiments, the receptor binding domain comprises an amino acid substitution that corresponds to R1156M or T1232R in SEQ ID NO: 1.

[0277] In some embodiments, the modified BoNT polypeptide comprises a modified protease domain of BoNT/A1, a translocation domain of BoNT/A1, and a modified receptor binding domain of BoNT/A2. In some embodiments, the modified BoNT polypeptide comprises an amino acid sequence that is at least 70% (e.g., at least 70%, at least 75%, at least 80%, at least 85%, at least 90%, at least 95%, or at least 99%) identical to SEQ ID NO: 78 fused to the amino acid sequence of any one of SEQ ID NO: 131-165 or 205, and comprises arginine substitutions at positions corresponding to one or more of K11, K212, K289, K291, K299, K335, K337, K343, K375, K381, and K415 in SEQ ID NO: 1 and one or more amino acid substitutions in the receptor binding domain at positions corresponding to 915, 923, 1090, 1103, 1117, 1156, 1170, 1227, 1254, 1255, or 1256 in SEQ ID NO: 35. In some embodiments, the modified BoNT polypeptide comprises an amino acid sequence that is at least 70% (e.g., at least 70%, at least 75%, at least 80%, at least 85%, at least 90%, at least 95%, or at least 99%) identical to SEQ ID NO: 70 fused to the amino acid sequence of any one of SEQ ID NO: 131-165 or 205, and comprising one or more amino acid substitutions in the receptor binding domain at positions corresponding to 915, 923, 1090, 1103, 1117, 1156, 1170, 1227, 1254, 1255, or 1256 in SEQ ID NO: 35. In some embodiments the one or more amino acid substitutions in the receptor binding domain correspond to one or more of K915Q, T923K, 51090N, N1103D, F1117Y, E1156M, E1170K, D1227N, L1254Q, Y1255G, or D1256N in SEQ ID NO: 35.

[0278] In some embodiments, the modified BoNT polypeptide is a chimeric BoNT comprising a receptor binding domain from a BoNT of a different serotype (e.g., BoNT/B, C, D, E, F, G, H, or EN) fused to a polypeptide comprising the translocation domain of BoNT/A1 and a modified protease domain of BoNT/A1 comprising arginine substitutions at positions corresponding to K11, K212, K289, K291, K299, K335, K337, K343, K375, K381, and K415 in SEQ ID NO: 1. In some embodiments, the modified BoNT polypeptide comprises a polypeptide comprising an amino acid sequence that is at least 70% (e.g., at least 70%, at least 75%, at least 80%, at least 85%, at least 90%, at least 95%, or at least 99%) identical to any one of SEQ ID NOs: 179-186, fused to a polypeptide comprising the translocation domain of BoNT/A1 and a modified protease domain of BoNT/A1 comprising arginine substitutions at positions corresponding to one or more of K11, K212, K289, K291, K299, K335, K337, K343, K375, K381, and K415 in SEQ ID NO: 1. In some embodiments, the modified BoNT polypeptide comprises a polypeptide comprising an amino acid sequence that is at least 70% (e.g., at least 70%, at least 75%, at least 80%, at least 85%, at least 90%, at least 95%, or at least 99%) identical to any one of SEQ ID NOs: 179-186, fused to a polypeptide comprising the translocation domain of BoNT/A1 and a modified protease domain of BoNT/A1 comprising arginine substitutions at positions corresponding to K11, K212, K289, K291, K299, K335, K337, K343, K375, K381, and K415 in SEQ ID NO: 1. In some embodiments, the modified BoNT polypeptide comprises a polypeptide comprising a receptor binding domain amino acid sequence that is at least 70% (e.g., at least 70%, at least 75%, at least 80%, at least 85%, at least 90%, at least 95%, or at least 99%) identical to any one of SEQ ID NOs: 179-186, fused to a polypeptide comprising an amino acid sequence that is at least 70% (e.g., at least 70%, at least 75%, at least 80%, at least 85%, at least 90%, at least 95%, or at least 99%) identical to SEQ ID NO: 44 and comprising arginine substitutions at positions corresponding to K11, K212, K289, K291, K299, K335, K337, K343, K375, K381, and K415 in SEQ ID NO: 1. In some embodiments, the modified BoNT polypeptide comprises a polypeptide comprising the amino acid sequence of any one of SEQ ID NOs: 179-186, fused to a polypeptide comprising the amino acid sequence of SEQ ID NO: 70. In some embodiments, the modified BoNT polypeptide comprises a polypeptide consisting of the amino acid sequence of any one of SEQ ID NOs: 179-186, fused to an amino acid sequence consisting of the amino acid sequence of SEQ ID NO: 70. In some embodiments, the modified BoNT polypeptide comprises the amino acid sequence of any one of SEQ ID NOs: 187-194 having arginine substitutions at positions corresponding to one or more of K11, K212, K289, K291, K299, K335, K337, K343, K375, K381, and K415 in SEQ ID NO: 1. In some embodiments, the modified BoNT polypeptide comprises the amino acid sequence of any one of SEQ ID NOs: 187-194 having arginine substitutions at positions corresponding to K11, K212, K289, K291, K299, K335, K337, K343, K375, K381, and K415 in SEQ ID NO: 1.

[0279] In some embodiments, the modified BoNT polypeptide is a modified protease domain of BoNT/A1 described herein. In some embodiments, the modified BoNT polypeptide comprises an amino acid sequence that is at least 70% (e.g., at least 70%, at least 75%, at least 80%, at least 85%, at least 90%, at least 95%, or at least 99%) identical to SEQ ID NO:1, and comprises arginine substitutions at positions corresponding to one or more of K11, K272, K289, K291, K299, K335, K337, K343, K375, K381, and K415 in SEQ ID NO: 1. In some embodiments, the modified BoNT polypeptide comprises an amino acid sequence that is at least 70% (e.g., at least 70%, at least 75%, at least 80%, at least 85%, at least 90%, at least 95%, or at least 99%) identical to SEQ ID NO:1, and comprises arginine substitutions at positions corresponding to K11, K272, K289, K291, K299, K335, K337, K343, K375, K381, and K415 in SEQ ID NO: 1. In some embodiments, the group of arginine substitutions at positions corresponding to K11, K272, K289, K291, K299, K335, K337, K343, K375, K381, and K415 in SEQ ID NO: 1 is referred to as KR11-272. In some embodiments, the modified BoNT polypeptide comprises the amino acid sequence of SEQ ID NO: 114. In some embodiments, the modified BoNT polypeptide consists of the amino acid sequence of SEQ ID NO: 114.

[0280] In some embodiments, the modified BoNT polypeptide comprises a modified protease domain of BoNT/A1 and a translocation domain of BoNT/A1. In some embodiments, the modified BoNT polypeptide comprises an amino acid sequence that is at least 70% (e.g., at least 70%, at least 75%, at least 80%, at least 85%, at least 90%, at least 95%, or at least 99%) identical to SEQ ID NO:1, and comprises arginine substitutions a positions corresponding to one or more of K11, K272, K289, K291, K299, K335, K337, K343, K375, K381, and K415 in SEQ ID NO: 1. In some embodiments, the modified BoNT polypeptide comprises an amino acid sequence that is at least 70% (e.g., at least 70%, at least 75%, at least 80%, at least 85%, at least 90%, at least 95%, or at least 99%) identical to SEQ ID NO:1, and comprises arginine substitutions a positions corresponding to K11, K272, K289, K291, K299, K335, K337, K343, K375, K381, and K415 in SEQ ID NO: 1. In some embodiments, the modified BoNT polypeptide comprises the amino acid sequence of SEQ ID NO: 71. In some embodiments, the modified BoNT polypeptide consists of the amino acid sequence of SEQ ID NO: 71.

[0281] In some embodiments, the modified BoNT polypeptide is a full-length BoNT/A1 polypeptide comprising the modified protease domain of BoNT/A1 described herein. In some embodiments, the modified BoNT polypeptide comprises an amino acid sequence that is at least 70% (e.g., at least 70%, at least 75%, at least 80%, at least 85%, at least 90%, at least 95%, or at least 99%) identical to SEQ ID NO: 1, and comprises arginine substitutions at positions corresponding to one or more of K11, K272, K289, K291, K299, K335, K337, K343, K375, K381, and K415 in SEQ ID NO: 1. In some embodiments, the modified BoNT polypeptide comprises an amino acid sequence that is at least 70% (e.g., at least 70%, at least 75%, at least 80%, at least 85%, at least 90%, at least 95%, or at least 99%) identical to SEQ ID NO: 1, and comprises arginine substitutions at positions corresponding to K11, K272, K289, K291, K299, K335, K337, K343, K375, K381, and K415 in SEQ ID NO: 1. In some embodiments, the modified BoNT polypeptide comprises the amino acid sequence of SEQ ID NO: 28. In some embodiments, the modified BoNT polypeptide consists of the amino acid sequence of SEQ ID NO: 28.

[0282] In some embodiments, the modified BoNT polypeptide comprises a modified protease domain of BoNT/A1, a translocation domain of BoNT/A1, and a modified receptor binding domain of BoNT/A1. In some embodiments, the modified BoNT polypeptide comprises an amino acid sequence that is at least 70% (e.g., at least 70%, at least 75%, at least 80%, at least 85%, at least 90%, at least 95%, or at least 99%) identical to SEQ ID NO: 1, and comprises arginine substitutions a positions corresponding to one or more of K11, K272, K289, K291, K299, K335, K337, K343, K375, K381, and K415 in SEQ ID NO: 1 and one or more amino acid substitutions in the receptor binding domain at positions corresponding to 917, 953, 954, 955, 957, 968, 1025, 1026, 1052, 1062, 1063, 1064, 1065, 1066, 1145, 1156, 1232, 1272, 1278, 1288, 1289, 1292, 1294, and 1295 in SEQ ID NO: 1. In some embodiments, the modified BoNT polypeptide comprises an amino acid sequence that is at least 70% (e.g., at least 70%, at least 75%, at least 80%, at least 85%, at least 90%, at least 95%, or at least 99%) identical to SEQ ID NO: 1, and comprises arginine substitutions a positions corresponding to K11, K272, K289, K291, K299, K335, K337, K343, K375, K381, and K415 in SEQ ID NO: 1 and one or more amino acid substitutions in the receptor binding domain at positions corresponding to 917, 953, 954, 955, 957, 968, 1025, 1026, 1052, 1062, 1063, 1064, 1065, 1066, 1145, 1156, 1232, 1272, 1278, 1288, 1289, 1292, 1294, and 1295 in SEQ ID NO: 1. In some embodiments the one or more amino acid substitutions in the receptor binding domain correspond to one or more of F917R or F917K; F953H or F953Y; N954S; S955K; S957N, S957Q or S957Y; M968I; N1025T; N1026K; N1052K; D1062E; T1063P; H1064R or H1064Q; R1065N; Y1066R or Y1066K; T1145Y; R1156M or R1156I; T1232R or T1232K; E1272G; L1278F, L1278Y or L1278W; D1288E or D1288N; D1289Y; G1292R or G1292K; R1294S or R1294T; and P1295S or P1295T in SEQ ID NO: 1. In some embodiments, the receptor binding domain comprises an amino acid substitution at a position corresponding to 1156 or 1232 in SEQ ID NO: 1. In some embodiments, the receptor binding domain comprises an amino acid substitution that corresponds to R1156M or T1232R in SEQ ID NO: 1.

[0283] In some embodiments, the modified BoNT polypeptide comprises a modified protease domain of BoNT/A1, a translocation domain of BoNT/A1, and a modified receptor binding domain of BoNT/A2. In some embodiments, the modified BoNT polypeptide comprises an amino acid sequence that is at least 70% (e.g., at least 70%, at least 75%, at least 80%, at least 85%, at least 90%, at least 95%, or at least 99%) identical to SEQ ID NO: 78 fused to the amino acid sequence of any one of SEQ ID NO: 131-165 or 205, and comprises arginine substitutions at positions corresponding to one or more of K11, K272, K289, K291, K299, K335, K337, K343, K375, K381, and K415 in SEQ ID NO: 1 and one or more amino acid substitutions in the receptor binding domain at positions corresponding to 915, 923, 1090, 1103, 1117, 1156, 1170, 1227, 1254, 1255, or 1256 in SEQ ID NO: 35. In some embodiments, the modified BoNT polypeptide comprises an amino acid sequence that is at least 70% (e.g., at least 70%, at least 75%, at least 80%, at least 85%, at least 90%, at least 95%, or at least 99%) identical to SEQ ID NO: 71 fused to the amino acid sequence of any one of SEQ ID NO: 131-165 or 205, and comprising one or more amino acid substitutions in the receptor binding domain at positions corresponding to 915, 923, 1090, 1103, 1117, 1156, 1170, 1227, 1254, 1255, or 1256 in SEQ ID NO: 35. In some embodiments the one or more amino acid substitutions in the receptor binding domain correspond to one or more of K915Q, T923K, 51090N, N1103D, F1117Y, E1156M, E1170K, D1227N, L1254Q, Y1255G, or D1256N in SEQ ID NO: 35.

[0284] In some embodiments, the modified BoNT polypeptide is a chimeric BoNT comprising a receptor binding domain from a BoNT of a different serotype (e.g., BoNT/B, C, D, E, F, G, H, or EN) fused to a polypeptide comprising the translocation domain of BoNT/A1 and a modified protease domain of BoNT/A1 comprising arginine substitutions at positions corresponding to K11, K272, K289, K291, K299, K335, K337, K343, K375, K381, and K415 in SEQ ID NO: 1. In some embodiments, the modified BoNT polypeptide comprises a polypeptide comprising an amino acid sequence that is at least 70% (e.g., at least 70%, at least 75%, at least 80%, at least 85%, at least 90%, at least 95%, or at least 99%) identical to any one of SEQ ID NOs: 179-186, fused to a polypeptide comprising the translocation domain of BoNT/A1 and a modified protease domain of BoNT/A1 comprising arginine substitutions at positions corresponding to one or more of K11, K272, K289, K291, K299, K335, K337, K343, K375, K381, and K415 in SEQ ID NO: 1. In some embodiments, the modified BoNT polypeptide comprises a polypeptide comprising an amino acid sequence that is at least 70% (e.g., at least 70%, at least 75%, at least 80%, at least 85%, at least 90%, at least 95%, or at least 99%) identical to any one of SEQ ID NOs: 179-186, fused to a polypeptide comprising the translocation domain of BoNT/A1 and a modified protease domain of BoNT/A1 comprising arginine substitutions at positions corresponding to K11, K272, K289, K291, K299, K335, K337, K343, K375, K381, and K415 in SEQ ID NO: 1. In some embodiments, the modified BoNT polypeptide comprises a polypeptide comprising a receptor binding domain amino acid sequence that is at least 70% (e.g., at least 70%, at least 75%, at least 80%, at least 85%, at least 90%, at least 95%, or at least 99%) identical to any one of SEQ ID NOs: 179-186, fused to a polypeptide comprising an amino acid sequence that is at least 70% (e.g., at least 70%, at least 75%, at least 80%, at least 85%, at least 90%, at least 95%, or at least 99%) identical to SEQ ID NO: 44 and comprising arginine substitutions at positions corresponding to K11, K272, K289, K291, K299, K335, K337, K343, K375, K381, and K415 in SEQ ID NO: 1. In some embodiments, the modified BoNT polypeptide comprises a polypeptide comprising the amino acid sequence of any one of SEQ ID NOs: 179-186, fused to a polypeptide comprising the amino acid sequence of SEQ ID NO: 71. In some embodiments, the modified BoNT polypeptide comprises a polypeptide consisting of the amino acid sequence of any one of SEQ ID NOs: 179-186, fused to an amino acid sequence consisting of the amino acid sequence of SEQ ID NO: 71. In some embodiments, the modified BoNT polypeptide comprises the amino acid sequence of any one of SEQ ID NOs: 187-194 having arginine substitutions at positions corresponding to one or more of K11, K272, K289, K291, K299, K335, K337, K343, K375, K381, and K415 in SEQ ID NO: 1. In some embodiments, the modified BoNT polypeptide comprises the amino acid sequence of any one of SEQ ID NOs: 187-194 having arginine substitutions at positions corresponding to K11, K272, K289, K291, K299, K335, K337, K343, K375, K381, and K415 in SEQ ID NO: 1.

[0285] In some embodiments, the modified BoNT polypeptide is a modified protease domain of BoNT/A1 described herein. In some embodiments, the modified BoNT polypeptide comprises an amino acid sequence that is at least 70% (e.g., at least 70%, at least 75%, at least 80%, at least 85%, at least 90%, at least 95%, or at least 99%) identical to SEQ ID NO:1, and comprises arginine substitutions at positions corresponding to one or more of K11, K289, K291, K299, K318, K335, K337, K343, K375, K381, and K415 in SEQ ID NO: 1. In some embodiments, the modified BoNT polypeptide comprises an amino acid sequence that is at least 70% (e.g., at least 70%, at least 75%, at least 80%, at least 85%, at least 90%, at least 95%, or at least 99%) identical to SEQ ID NO:1, and comprises arginine substitutions at positions corresponding to K11, K289, K291, K299, K318, K335, K337, K343, K375, K381, and K415 in SEQ ID NO: 1. In some embodiments, the group of arginine substitutions at positions corresponding to K11, K289, K291, K299, K318, K335, K337, K343, K375, K381, and K415 in SEQ ID NO: 1 is referred to as KR11-318. In some embodiments, the modified BoNT polypeptide comprises the amino acid sequence of SEQ ID NO: 115. In some embodiments, the modified BoNT polypeptide consists of the amino acid sequence of SEQ ID NO: 115.

[0286] In some embodiments, the modified BoNT polypeptide comprises a modified protease domain of BoNT/A1 and a translocation domain of BoNT/A1. In some embodiments, the modified BoNT polypeptide comprises an amino acid sequence that is at least 70% (e.g., at least 70%, at least 75%, at least 80%, at least 85%, at least 90%, at least 95%, or at least 99%) identical to SEQ ID NO:1, and comprises arginine substitutions a positions corresponding to one or more of K11, K289, K291, K299, K318, K335, K337, K343, K375, K381, and K415 in SEQ ID NO: 1. In some embodiments, the modified BoNT polypeptide comprises an amino acid sequence that is at least 70% (e.g., at least 70%, at least 75%, at least 80%, at least 85%, at least 90%, at least 95%, or at least 99%) identical to SEQ ID NO:1, and comprises arginine substitutions a positions corresponding to K11, K289, K291, K299, K318, K335, K337, K343, K375, K381, and K415 in SEQ ID NO: 1. In some embodiments, the modified BoNT polypeptide comprises the amino acid sequence of SEQ ID NO: 72. In some embodiments, the modified BoNT polypeptide consists of the amino acid sequence of SEQ ID NO: 72.

[0287] In some embodiments, the modified BoNT polypeptide is a full-length BoNT/A1 polypeptide comprising the modified protease domain of BoNT/A1 described herein. In some embodiments, the modified BoNT polypeptide comprises an amino acid sequence that is at least 70% (e.g., at least 70%, at least 75%, at least 80%, at least 85%, at least 90%, at least 95%, or at least 99%) identical to SEQ ID NO: 1, and comprises arginine substitutions at positions corresponding to one or more of K11, K289, K291, K299, K318, K335, K337, K343, K375, K381, and K415 in SEQ ID NO: 1. In some embodiments, the modified BoNT polypeptide comprises an amino acid sequence that is at least 70% (e.g., at least 70%, at least 75%, at least 80%, at least 85%, at least 90%, at least 95%, or at least 99%) identical to SEQ ID NO: 1, and comprises arginine substitutions at positions corresponding to K11, K289, K291, K299, K318, K335, K337, K343, K375, K381, and K415 in SEQ ID NO: 1. In some embodiments, the modified BoNT polypeptide comprises the amino acid sequence of SEQ ID NO: 29. In some embodiments, the modified BoNT polypeptide consists of the amino acid sequence of SEQ ID NO: 29.

[0288] In some embodiments, the modified BoNT polypeptide comprises a modified protease domain of BoNT/A1, a translocation domain of BoNT/A1, and a modified receptor binding domain of BoNT/A1. In some embodiments, the modified BoNT polypeptide comprises an amino acid sequence that is at least 70% (e.g., at least 70%, at least 75%, at least 80%, at least 85%, at least 90%, at least 95%, or at least 99%) identical to SEQ ID NO: 1, and comprises arginine substitutions a positions corresponding to one or more of K11, K289, K291, K299, K318, K335, K337, K343, K375, K381, and K415 in SEQ ID NO: 1 and one or more amino acid substitutions in the receptor binding domain at positions corresponding to 917, 953, 954, 955, 957, 968, 1025, 1026, 1052, 1062, 1063, 1064, 1065, 1066, 1145, 1156, 1232, 1272, 1278, 1288, 1289, 1292, 1294, and 1295 in SEQ ID NO: 1. In some embodiments, the modified BoNT polypeptide comprises an amino acid sequence that is at least 70% (e.g., at least 70%, at least 75%, at least 80%, at least 85%, at least 90%, at least 95%, or at least 99%) identical to SEQ ID NO: 1, and comprises arginine substitutions a positions corresponding to K11, K289, K291, K299, K318, K335, K337, K343, K375, K381, and K415 in SEQ ID NO: 1 and one or more amino acid substitutions in the receptor binding domain at positions corresponding to 917, 953, 954, 955, 957, 968, 1025, 1026, 1052, 1062, 1063, 1064, 1065, 1066, 1145, 1156, 1232, 1272, 1278, 1288, 1289, 1292, 1294, and 1295 in SEQ ID NO: 1. In some embodiments the one or more amino acid substitutions in the receptor binding domain correspond to one or more of F917R or F917K; F953H or F953Y; N954S; S955K; S957N, S957Q or S957Y; M968I; N1025T; N1026K; N1052K; D1062E; T1063P; H1064R or H1064Q; R1065N; Y1066R or Y1066K; T1145Y; R1156M or R1156I; T1232R or T1232K; E1272G; L1278F, L1278Y or L1278W; D1288E or D1288N; D1289Y; G1292R or G1292K; R1294S or R1294T; and P1295S or P1295T in SEQ ID NO: 1. In some embodiments, the receptor binding domain comprises an amino acid substitution at a position corresponding to 1156 or 1232 in SEQ ID NO: 1. In some embodiments, the receptor binding domain comprises an amino acid substitution that corresponds to R1156M or T1232R in SEQ ID NO: 1.

[0289] In some embodiments, the modified BoNT polypeptide comprises a modified protease domain of BoNT/A1, a translocation domain of BoNT/A1, and a modified receptor binding domain of BoNT/A2. In some embodiments, the modified BoNT polypeptide comprises an amino acid sequence that is at least 70% (e.g., at least 70%, at least 75%, at least 80%, at least 85%, at least 90%, at least 95%, or at least 99%) identical to SEQ ID NO: 78 fused to the amino acid sequence of any one of SEQ ID NO: 131-165 or 205, and comprises arginine substitutions at positions corresponding to one or more of K11, K289, K291, K299, K318, K335, K337, K343, K375, K381, and K415 in SEQ ID NO: 1 and one or more amino acid substitutions in the receptor binding domain at positions corresponding to 915, 923, 1090, 1103, 1117, 1156, 1170, 1227, 1254, 1255, or 1256 in SEQ ID NO: 35. In some embodiments, the modified BoNT polypeptide comprises an amino acid sequence that is at least 70% (e.g., at least 70%, at least 75%, at least 80%, at least 85%, at least 90%, at least 95%, or at least 99%) identical to SEQ ID NO: 72 fused to the amino acid sequence of any one of SEQ ID NO: 131-165 or 205, and comprising one or more amino acid substitutions in the receptor binding domain at positions corresponding to 915, 923, 1090, 1103, 1117, 1156, 1170, 1227, 1254, 1255, or 1256 in SEQ ID NO: 35. In some embodiments the one or more amino acid substitutions in the receptor binding domain correspond to one or more of K915Q, T923K, 51090N, N1103D, F1117Y, E1156M, E1170K, D1227N, L1254Q, Y1255G, or D1256N in SEQ ID NO: 35.

[0290] In some embodiments, the modified BoNT polypeptide is a chimeric BoNT comprising a receptor binding domain from a BoNT of a different serotype (e.g., BoNT/B, C, D, E, F, G, H, or EN) fused to a polypeptide comprising the translocation domain of BoNT/A1 and a modified protease domain of BoNT/A1 comprising arginine substitutions at positions corresponding to K11, K289, K291, K299, K318, K335, K337, K343, K375, K381, and K415 in SEQ ID NO: 1. In some embodiments, the modified BoNT polypeptide comprises a polypeptide comprising an amino acid sequence that is at least 70% (e.g., at least 70%, at least 75%, at least 80%, at least 85%, at least 90%, at least 95%, or at least 99%) identical to any one of SEQ ID NOs: 179-186, fused to a polypeptide comprising the translocation domain of BoNT/A1 and a modified protease domain of BoNT/A1 comprising arginine substitutions at positions corresponding to one or more of K11, K289, K291, K299, K318, K335, K337, K343, K375, K381, and K415 in SEQ ID NO: 1. In some embodiments, the modified BoNT polypeptide comprises a polypeptide comprising an amino acid sequence that is at least 70% (e.g., at least 70%, at identical to any one of SEQ ID NOs: 179-186, fused to a polypeptide comprising the translocation domain of BoNT/A1 and a modified protease domain of BoNT/A1 comprising arginine substitutions at positions corresponding to K11, K289, K291, K299, K318, K335, K337, K343, K375, K381, and K415 in SEQ ID NO: 1. In some embodiments, the modified BoNT polypeptide comprises a polypeptide comprising a receptor binding domain amino acid sequence that is at least 70% (e.g., at least 70%, at least 75%, at least 80%, at least 85%, at least 90%, at least 95%, or at least 99%) identical to any one of SEQ ID NOs: 179-186, fused to a polypeptide comprising an amino acid sequence that is at least 70% (e.g., at least 70%, at least 75%, at least 80%, at least 85%, at least 90%, at least 95%, or at least 99%) identical to SEQ ID NO: 44 and comprising arginine substitutions at positions corresponding to K11, K289, K291, K299, K318, K335, K337, K343, K375, K381, and K415 in SEQ ID NO: 1. In some embodiments, the modified BoNT polypeptide comprises a polypeptide comprising the amino acid sequence of any one of SEQ ID NOs: 179-186, fused to a polypeptide comprising the amino acid sequence of SEQ ID NO: 72. In some embodiments, the modified BoNT polypeptide comprises a polypeptide consisting of the amino acid sequence of any one of SEQ ID NOs: 179-186, fused to an amino acid sequence consisting of the amino acid sequence of SEQ ID NO: 72. In some embodiments, the modified BoNT polypeptide comprises the amino acid sequence of any one of SEQ ID NOs: 187-194 having arginine substitutions at positions corresponding to one or more of K11, K289, K291, K299, K318, K335, K337, K343, K375, K381, and K415 in SEQ ID NO: 1. In some embodiments, the modified BoNT polypeptide comprises the amino acid sequence of any one of SEQ ID NOs: 187-194 having arginine substitutions at positions corresponding to K11, K289, K291, K299, K318, K335, K337, K343, K375, K381, and K415 in SEQ ID NO: 1.

[0291] In some embodiments, the modified BoNT polypeptide is a modified protease domain of BoNT/A1 described herein. In some embodiments, the modified BoNT polypeptide comprises an amino acid sequence that is at least 70% (e.g., at least 70%, at least 75%, at least 80%, at least 85%, at least 90%, at least 95%, or at least 99%) identical to SEQ ID NO:1, and comprises arginine substitutions at positions corresponding to one or more of K11, K289, K291, K299, K335, K337, K340, K343, K375, K381, and K415 in SEQ ID NO: 1. In some embodiments, the modified BoNT polypeptide comprises an amino acid sequence that is at least 70% (e.g., at least 70%, at least 75%, at least 80%, at least 85%, at least 90%, at least 95%, or at least 99%) identical to SEQ ID NO:1, and comprises arginine substitutions at positions corresponding to K11, K289, K291, K299, K335, K337, K340, K343, K375, K381, and K415 in SEQ ID NO: 1. In some embodiments, the group of arginine substitutions at positions corresponding to K11, K289, K291, K299, K335, K337, K340, K343, K375, K381, and K415 in SEQ ID NO: 1 is referred to as KR11-340. In some embodiments, the modified BoNT polypeptide comprises the amino acid sequence of SEQ ID NO: 116. In some embodiments, the modified BoNT polypeptide consists of the amino acid sequence of SEQ ID NO: 116.

[0292] In some embodiments, the modified BoNT polypeptide comprises a modified protease domain of BoNT/A1 and a translocation domain of BoNT/A1. In some embodiments, the modified BoNT polypeptide comprises an amino acid sequence that is at least 70% (e.g., at least 70%, at least 75%, at least 80%, at least 85%, at least 90%, at least 95%, or at least 99%) identical to SEQ ID NO:1, and comprises arginine substitutions a positions corresponding to one or more of K11, K289, K291, K299, K335, K337, K340, K343, K375, K381, and K415 in SEQ ID NO: 1. In some embodiments, the modified BoNT polypeptide comprises an amino acid sequence that is at least 70% (e.g., at least 70%, at least 75%, at least 80%, at least 85%, at least 90%, at least 95%, or at least 99%) identical to SEQ ID NO:1, and comprises arginine substitutions a positions corresponding to K11, K289, K291, K299, K335, K337, K340, K343, K375, K381, and K415 in SEQ ID NO: 1. In some embodiments, the modified BoNT polypeptide comprises the amino acid sequence of SEQ ID NO: 73. In some embodiments, the modified BoNT polypeptide consists of the amino acid sequence of SEQ ID NO: 73.

[0293] In some embodiments, the modified BoNT polypeptide is a full-length BoNT/A1 polypeptide comprising the modified protease domain of BoNT/A1 described herein. In some embodiments, the modified BoNT polypeptide comprises an amino acid sequence that is at least 70% (e.g., at least 70%, at least 75%, at least 80%, at least 85%, at least 90%, at least 95%, or at least 99%) identical to SEQ ID NO: 1, and comprises arginine substitutions at positions corresponding to one or more of K11, K289, K291, K299, K335, K337, K340, K343, K375, K381, and K415 in SEQ ID NO: 1. In some embodiments, the modified BoNT polypeptide comprises an amino acid sequence that is at least 70% (e.g., at least 70%, at least 75%, at least 80%, at least 85%, at least 90%, at least 95%, or at least 99%) identical to SEQ ID NO: 1, and comprises arginine substitutions at positions corresponding to K11, K289, K291, K299, K335, K337, K340, K343, K375, K381, and K415 in SEQ ID NO: 1. In some embodiments, the modified BoNT polypeptide comprises the amino acid sequence of SEQ ID NO: 30. In some embodiments, the modified BoNT polypeptide consists of the amino acid sequence of SEQ ID NO: 30.

[0294] In some embodiments, the modified BoNT polypeptide comprises a modified protease domain of BoNT/A1, a translocation domain of BoNT/A1, and a modified receptor binding domain of BoNT/A1. In some embodiments, the modified BoNT polypeptide comprises an amino acid sequence that is at least 70% (e.g., at least 70%, at least 75%, at least 80%, at least 85%, at least 90%, at least 95%, or at least 99%) identical to SEQ ID NO: 1, and comprises arginine substitutions a positions corresponding to one or more of K11, K289, K291, K299, K335, K337, K340, K343, K375, K381, and K415 in SEQ ID NO: 1 and one or more amino acid substitutions in the receptor binding domain at positions corresponding to 917, 953, 954, 955, 957, 968, 1025, 1026, 1052, 1062, 1063, 1064, 1065, 1066, 1145, 1156, 1232, 1272, 1278, 1288, 1289, 1292, 1294, and 1295 in SEQ ID NO: 1. In some embodiments, the modified BoNT polypeptide comprises an amino acid sequence that is at least 70% (e.g., at least 70%, at least 75%, at least 80%, at least 85%, at least 90%, at least 95%, or at least 99%) identical to SEQ ID NO: 1, and comprises arginine substitutions a positions corresponding to K11, K289, K291, K299, K335, K337, K340, K343, K375, K381, and K415 in SEQ ID NO: 1 and one or more amino acid substitutions in the receptor binding domain at positions corresponding to 917, 953, 954, 955, 957, 968, 1025, 1026, 1052, 1062, 1063, 1064, 1065, 1066, 1145, 1156, 1232, 1272, 1278, 1288, 1289, 1292, 1294, and 1295 in SEQ ID NO: 1. In some embodiments the one or more amino acid substitutions in the receptor binding domain correspond to one or more of F917R or F917K; F953H or F953Y; N954S; S955K; S957N, S957Q or S957Y; M968I; N1025T; N1026K; N1052K; D1062E; T1063P; H1064R or H1064Q; R1065N; Y1066R or Y1066K; T1145Y; R1156M or R1156I; T1232R or T1232K; E1272G; L1278F, L1278Y or L1278W; D1288E or D1288N; D1289Y; G1292R or G1292K; R1294S or R1294T; and P1295S or P1295T in SEQ ID NO: 1. In some embodiments, the receptor binding domain comprises an amino acid substitution at a position corresponding to 1156 or 1232 in SEQ ID NO: 1. In some embodiments, the receptor binding domain comprises an amino acid substitution that corresponds to R1156M or T1232R in SEQ ID NO: 1.

[0295] In some embodiments, the modified BoNT polypeptide comprises a modified protease domain of BoNT/A1, a translocation domain of BoNT/A1, and a modified receptor binding domain of BoNT/A2. In some embodiments, the modified BoNT polypeptide comprises an amino acid sequence that is at least 70% (e.g., at least 70%, at least 75%, at least 80%, at least 85%, at least 90%, at least 95%, or at least 99%) identical to SEQ ID NO: 78 fused to the amino acid sequence of any one of SEQ ID NO: 131-165 or 205, and comprises arginine substitutions at positions corresponding to one or more of K11, K289, K291, K299, K335, K337, K340, K343, K375, K381, and K415 in SEQ ID NO: 1 and one or more amino acid substitutions in the receptor binding domain at positions corresponding to 915, 923, 1090, 1103, 1117, 1156, 1170, 1227, 1254, 1255, or 1256 in SEQ ID NO: 35. In some embodiments, the modified BoNT polypeptide comprises an amino acid sequence that is at least 70% (e.g., at least 70%, at least 75%, at least 80%, at least 85%, at least 90%, at least 95%, or at least 99%) identical to SEQ ID NO: 73 fused to the amino acid sequence of any one of SEQ ID NO: 131-165 or 205, and comprising one or more amino acid substitutions in the receptor binding domain at positions corresponding to 915, 923, 1090, 1103, 1117, 1156, 1170, 1227, 1254, 1255, or 1256 in SEQ ID NO: 35. In some embodiments the one or more amino acid substitutions in the receptor binding domain correspond to one or more of K915Q, T923K, 51090N, N1103D, F1117Y, E1156M, E1170K, D1227N, L1254Q, Y1255G, or D1256N in SEQ ID NO: 35.

[0296] In some embodiments, the modified BoNT polypeptide is a chimeric BoNT comprising a receptor binding domain from a BoNT of a different serotype (e.g., BoNT/B, C, D, E, F, G, H, or EN) fused to a polypeptide comprising the translocation domain of BoNT/A1 and a modified protease domain of BoNT/A1 comprising arginine substitutions at positions corresponding to K11, K289, K291, K299, K335, K337, K340, K343, K375, K381, and K415 in SEQ ID NO: 1. In some embodiments, the modified BoNT polypeptide comprises a polypeptide comprising an amino acid sequence that is at least 70% (e.g., at least 70%, at least 75%, at least 80%, at least 85%, at least 90%, at least 95%, or at least 99%) identical to any one of SEQ ID NOs: 179-186, fused to a polypeptide comprising the translocation domain of BoNT/A1 and a modified protease domain of BoNT/A1 comprising arginine substitutions at positions corresponding to one or more of K11, K289, K291, K299, K335, K337, K340, K343, K375, K381, and K415 in SEQ ID NO: 1. In some embodiments, the modified BoNT polypeptide comprises a polypeptide comprising an amino acid sequence that is at least 70% (e.g., at least 70%, at least 75%, at least 80%, at least 85%, at least 90%, at least 95%, or at least 99%) identical to any one of SEQ ID NOs: 179-186, fused to a polypeptide comprising the translocation domain of BoNT/A1 and a modified protease domain of BoNT/A1 comprising arginine substitutions at positions corresponding to K11, K289, K291, K299, K335, K337, K340, K343, K375, K381, and K415 in SEQ ID NO: 1. In some embodiments, the modified BoNT polypeptide comprises a polypeptide comprising a receptor binding domain amino acid sequence that is at least 70% (e.g., at least 70%, at least 75%, at least 80%, at least 85%, at least 90%, at least 95%, or at least 99%) identical to any one of SEQ ID NOs: 179-186, fused to a polypeptide comprising an amino acid sequence that is at least 70% (e.g., at least 70%, at least 75%, at least 80%, at least 85%, at least 90%, at least 95%, or at least 99%) identical to SEQ ID NO: 44 and comprising arginine substitutions at positions corresponding to K11, K289, K291, K299, K335, K337, K340, K343, K375, K381, and K415 in SEQ ID NO: 1. In some embodiments, the modified BoNT polypeptide comprises a polypeptide comprising the amino acid sequence of any one of SEQ ID NOs: 179-186, fused to a polypeptide comprising the amino acid sequence of SEQ ID NO: 73. In some embodiments, the modified BoNT polypeptide comprises a polypeptide consisting of the amino acid sequence of any one of SEQ ID NOs: 179-186, fused to an amino acid sequence consisting of the amino acid sequence of SEQ ID NO: 73. In some embodiments, the modified BoNT polypeptide comprises the amino acid sequence of any one of SEQ ID NOs: 187-194 having arginine substitutions at positions corresponding to one or more of K11, K289, K291, K299, K335, K337, K340, K343, K375, K381, and K415 in SEQ ID NO: 1. In some embodiments, the modified BoNT polypeptide comprises the amino acid sequence of any one of SEQ ID NOs: 187-194 having arginine substitutions at positions corresponding to K11, K289, K291, K299, K335, K337, K340, K343, K375, K381, and K415 in SEQ ID NO: 1.

[0297] In some embodiments, the modified BoNT polypeptide is a modified protease domain of BoNT/A1 described herein. In some embodiments, the modified BoNT polypeptide comprises an amino acid sequence that is at least 70% (e.g., at least 70%, at least 75%, at least 80%, at least 85%, at least 90%, at least 95%, or at least 99%) identical to SEQ ID NO:1, and comprises arginine substitutions at positions corresponding to one or more of K11, K289, K291, K299, K335, K337, K343, K356, K375, K381, and K415 in SEQ ID NO: 1. In some embodiments, the modified BoNT polypeptide comprises an amino acid sequence that is at least 70% (e.g., at least 70%, at least 75%, at least 80%, at least 85%, at least 90%, at least 95%, or at least 99%) identical to SEQ ID NO:1, and comprises arginine substitutions at positions corresponding to K11, K289, K291, K299, K335, K337, K343, K356, K375, K381, and K415 in SEQ ID NO: 1. In some embodiments, the group of arginine substitutions at positions corresponding to K11, K289, K291, K299, K335, K337, K343, K356, K375, K381, and K415 in SEQ ID NO: 1 is referred to as KR11-356. In some embodiments, the modified BoNT polypeptide comprises the amino acid sequence of SEQ ID NO: 117. In some embodiments, the modified BoNT polypeptide consists of the amino acid sequence of SEQ ID NO: 117.

[0298] In some embodiments, the modified BoNT polypeptide comprises a modified protease domain of BoNT/A1 and a translocation domain of BoNT/A1. In some embodiments, the modified BoNT polypeptide comprises an amino acid sequence that is at least 70% (e.g., at least 70%, at least 75%, at least 80%, at least 85%, at least 90%, at least 95%, or at least 99%) identical to SEQ ID NO:1, and comprises arginine substitutions a positions corresponding to one or more of K11, K289, K291, K299, K335, K337, K343, K356, K375, K381, and K415 in SEQ ID NO: 1. In some embodiments, the modified BoNT polypeptide comprises an amino acid sequence that is at least 70% (e.g., at least 70%, at least 75%, at least 80%, at least 85%, at least 90%, at least 95%, or at least 99%) identical to SEQ ID NO:1, and comprises arginine substitutions a positions corresponding to K11, K289, K291, K299, K335, K337, K343, K356, K375, K381, and K415 in SEQ ID NO: 1. In some embodiments, the modified BoNT polypeptide comprises the amino acid sequence of SEQ ID NO: 74. In some embodiments, the modified BoNT polypeptide consists of the amino acid sequence of SEQ ID NO: 74.

[0299] In some embodiments, the modified BoNT polypeptide is a full-length BoNT/A1 polypeptide comprising the modified protease domain of BoNT/A1 described herein. In some embodiments, the modified BoNT polypeptide comprises an amino acid sequence that is at least 70% (e.g., at least 70%, at least 75%, at least 80%, at least 85%, at least 90%, at least 95%, or at least 99%) identical to SEQ ID NO: 1, and comprises arginine substitutions at positions corresponding to one or more of K11, K289, K291, K299, K335, K337, K343, K356, K375, K381, and K415 in SEQ ID NO: 1. In some embodiments, the modified BoNT polypeptide comprises an amino acid sequence that is at least 70% (e.g., at least 70%, at least 75%, at least 80%, at least 85%, at least 90%, at least 95%, or at least 99%) identical to SEQ ID NO: 1, and comprises arginine substitutions at positions corresponding to K11, K289, K291, K299, K335, K337, K343, K356, K375, K381, and K415 in SEQ ID NO: 1. In some embodiments, the modified BoNT polypeptide comprises the amino acid sequence of SEQ ID NO: 31. In some embodiments, the modified BoNT polypeptide consists of the amino acid sequence of SEQ ID NO: 31.

[0300] In some embodiments, the modified BoNT polypeptide comprises a modified protease domain of BoNT/A1, a translocation domain of BoNT/A1, and a modified receptor binding domain of BoNT/A1. In some embodiments, the modified BoNT polypeptide comprises an amino acid sequence that is at least 70% (e.g., at least 70%, at least 75%, at least 80%, at least 85%, at least 90%, at least 95%, or at least 99%) identical to SEQ ID NO: 1, and comprises arginine substitutions a positions corresponding to one or more of K11, K289, K291, K299, K335, K337, K343, K356, K375, K381, and K415 in SEQ ID NO: 1 and one or more amino acid substitutions in the receptor binding domain at positions corresponding to 917, 953, 954, 955, 957, 968, 1025, 1026, 1052, 1062, 1063, 1064, 1065, 1066, 1145, 1156, 1232, 1272, 1278, 1288, 1289, 1292, 1294, and 1295 in SEQ ID NO: 1. In some embodiments, the modified BoNT polypeptide comprises an amino acid sequence that is at least 70% (e.g., at least 70%, at least 75%, at least 80%, at least 85%, at least 90%, at least 95%, or at least 99%) identical to SEQ ID NO: 1, and comprises arginine substitutions a positions corresponding to K11, K289, K291, K299, K335, K337, K343, K356, K375, K381, and K415 in SEQ ID NO: 1 and one or more amino acid substitutions in the receptor binding domain at positions corresponding to 917, 953, 954, 955, 957, 968, 1025, 1026, 1052, 1062, 1063, 1064, 1065, 1066, 1145, 1156, 1232, 1272, 1278, 1288, 1289, 1292, 1294, and 1295 in SEQ ID NO: 1. In some embodiments the one or more amino acid substitutions in the receptor binding domain correspond to one or more of F917R or F917K; F953H or F953Y; N954S; S955K; S957N, S957Q or S957Y; M968I; N1025T; N1026K; N1052K; D1062E; T1063P; H1064R or H1064Q; R1065N; Y1066R or Y1066K; T1145Y; R1156M or R1156I; T1232R or T1232K; E1272G; L1278F, L1278Y or L1278W; D1288E or D1288N; D1289Y; G1292R or G1292K; R1294S or R1294T; and P1295S or P1295T in SEQ ID NO: 1. In some embodiments, the receptor binding domain comprises an amino acid substitution at a position corresponding to 1156 or 1232 in SEQ ID NO: 1. In some embodiments, the receptor binding domain comprises an amino acid substitution that corresponds to R1156M or T1232R in SEQ ID NO: 1.

[0301] In some embodiments, the modified BoNT polypeptide comprises a modified protease domain of BoNT/A1, a translocation domain of BoNT/A1, and a modified receptor binding domain of BoNT/A2. In some embodiments, the modified BoNT polypeptide comprises an amino acid sequence that is at least 70% (e.g., at least 70%, at least 75%, at least 80%, at least 85%, at least 90%, at least 95%, or at least 99%) identical to SEQ ID NO: 78 fused to the amino acid sequence of any one of SEQ ID NO: 131-165 or 205, and comprises arginine substitutions at positions corresponding to one or more of K11, K289, K291, K299, K335, K337, K343, K356, K375, K381, and K415 in SEQ ID NO: 1 and one or more amino acid substitutions in the receptor binding domain at positions corresponding to 915, 923, 1090, 1103, 1117, 1156, 1170, 1227, 1254, 1255, or 1256 in SEQ ID NO: 35. In some embodiments, the modified BoNT polypeptide comprises an amino acid sequence that is at least 70% (e.g., at least 70%, at least 75%, at least 80%, at least 85%, at least 90%, at least 95%, or at least 99%) identical to SEQ ID NO: 74 fused to the amino acid sequence of any one of SEQ ID NO: 131-165 or 205, and comprising one or more amino acid substitutions in the receptor binding domain at positions corresponding to 915, 923, 1090, 1103, 1117, 1156, 1170, 1227, 1254, 1255, or 1256 in SEQ ID NO: 35. In some embodiments the one or more amino acid substitutions in the receptor binding domain correspond to one or more of K915Q, T923K, 51090N, N1103D, F1117Y, E1156M, E1170K, D1227N, L1254Q, Y1255G, or D1256N in SEQ ID NO: 35.

[0302] In some embodiments, the modified BoNT polypeptide is a chimeric BoNT comprising a receptor binding domain from a BoNT of a different serotype (e.g., BoNT/B, C, D, E, F, G, H, or EN) fused to a polypeptide comprising the translocation domain of BoNT/A1 and a modified protease domain of BoNT/A1 comprising arginine substitutions at positions corresponding to K11, K289, K291, K299, K335, K337, K343, K356, K375, K381, and K415 in SEQ ID NO: 1. In some embodiments, the modified BoNT polypeptide comprises a polypeptide comprising an amino acid sequence that is at least 70% (e.g., at least 70%, at least 75%, at least 80%, at least 85%, at least 90%, at least 95%, or at least 99%) identical to any one of SEQ ID NOs: 179-186, fused to a polypeptide comprising the translocation domain of BoNT/A1 and a modified protease domain of BoNT/A1 comprising arginine substitutions at positions corresponding to one or more of K11, K289, K291, K299, K335, K337, K343, K356, K375, K381, and K415 in SEQ ID NO: 1. In some embodiments, the modified BoNT polypeptide comprises a polypeptide comprising an amino acid sequence that is at least 70% (e.g., at least 70%, at least 75%, at least 80%, at least 85%, at least 90%, at least 95%, or at least 99%) identical to any one of SEQ ID NOs: 179-186, fused to a polypeptide comprising the translocation domain of BoNT/A1 and a modified protease domain of BoNT/A1 comprising arginine substitutions at positions corresponding to K11, K289, K291, K299, K335, K337, K343, K356, K375, K381, and K415 in SEQ ID NO: 1. In some embodiments, the modified BoNT polypeptide comprises a polypeptide comprising a receptor binding domain amino acid sequence that is at least 70% (e.g., at least 70%, at least 75%, at least 80%, at least 85%, at least 90%, at least 95%, or at least 99%) identical to any one of SEQ ID NOs: 179-186, fused to a polypeptide comprising an amino acid sequence that is at least 70% (e.g., at least 70%, at least 75%, at least 80%, at least 85%, at least 90%, at least 95%, or at least 99%) identical to SEQ ID NO: 44 and comprising arginine substitutions at positions corresponding to K11, K289, K291, K299, K335, K337, K343, K356, K375, K381, and K415 in SEQ ID NO: 1. In some embodiments, the modified BoNT polypeptide comprises a polypeptide comprising the amino acid sequence of any one of SEQ ID NOs: 179-186, fused to a polypeptide comprising the amino acid sequence of SEQ ID NO: 74. In some embodiments, the modified BoNT polypeptide comprises a polypeptide consisting of the amino acid sequence of any one of SEQ ID NOs: 179-186, fused to an amino acid sequence consisting of the amino acid sequence of SEQ ID NO: 74. In some embodiments, the modified BoNT polypeptide comprises the amino acid sequence of any one of SEQ ID NOs: 187-194 having arginine substitutions at positions corresponding to one or more of K11, K289, K291, K299, K335, K337, K343, K356, K375, K381, and K415 in SEQ ID NO: 1. In some embodiments, the modified BoNT polypeptide comprises the amino acid sequence of any one of SEQ ID NOs: 187-194 having arginine substitutions at positions corresponding to K11, K289, K291, K299, K335, K337, K343, K356, K375, K381, and K415 in SEQ ID NO: 1.

[0303] In some embodiments, the modified BoNT polypeptide is a modified protease domain of BoNT/A1 described herein. In some embodiments, the modified BoNT polypeptide comprises an amino acid sequence that is at least 70% (e.g., at least 70%, at least 75%, at least 80%, at least 85%, at least 90%, at least 95%, or at least 99%) identical to SEQ ID NO:1, and comprises arginine substitutions at positions corresponding to one or more of K11, K41, K289, K291, K299, K318, K335, K337, K340, K343, K375, K381, and K415 in SEQ ID NO: 1. In some embodiments, the modified BoNT polypeptide comprises an amino acid sequence that is at least 70% (e.g., at least 70%, at least 75%, at least 80%, at least 85%, at least 90%, at least 95%, or at least 99%) identical to SEQ ID NO:1, and comprises arginine substitutions at positions corresponding to K11, K41, K289, K291, K299, K318, K335, K337, K340, K343, K375, K381, and K415 in SEQ ID NO: 1. In some embodiments, the group of arginine substitutions at positions corresponding to K11, K41, K289, K291, K299, K318, K335, K337, K340, K343, K375, K381, and K415 in SEQ ID NO: 1 is referred to as KR13. In some embodiments, the modified BoNT polypeptide comprises the amino acid sequence of SEQ ID NO: 118. In some embodiments, the modified BoNT polypeptide consists of the amino acid sequence of SEQ ID NO: 118.

[0304] In some embodiments, the modified BoNT polypeptide comprises a modified protease domain of BoNT/A1 and a translocation domain of BoNT/A1. In some embodiments, the modified BoNT polypeptide comprises an amino acid sequence that is at least 70% (e.g., at least 70%, at least 75%, at least 80%, at least 85%, at least 90%, at least 95%, or at least 99%) identical to SEQ ID NO:1, and comprises arginine substitutions a positions corresponding to one or more of K11, K41, K289, K291, K299, K318, K335, K337, K340, K343, K375, K381, and K415 in SEQ ID NO: 1. In some embodiments, the modified BoNT polypeptide comprises an amino acid sequence that is at least 70% (e.g., at least 70%, at least 75%, at least 80%, at least 85%, at least 90%, at least 95%, or at least 99%) identical to SEQ ID NO:1, and comprises arginine substitutions a positions corresponding to K11, K41, K289, K291, K299, K318, K335, K337, K340, K343, K375, K381, and K415 in SEQ ID NO: 1. In some embodiments, the modified BoNT polypeptide comprises the amino acid sequence of SEQ ID NO: 75. In some embodiments, the modified BoNT polypeptide consists of the amino acid sequence of SEQ ID NO: 75.

[0305] In some embodiments, the modified BoNT polypeptide is a full-length BoNT/A1 polypeptide comprising the modified protease domain of BoNT/A1 described herein. In some embodiments, the modified BoNT polypeptide comprises an amino acid sequence that is at least 70% (e.g., at least 70%, at least 75%, at least 80%, at least 85%, at least 90%, at least 95%, or at least 99%) identical to SEQ ID NO: 1, and comprises arginine substitutions at positions corresponding to one or more of K11, K41, K289, K291, K299, K318, K335, K337, K340, K343, K375, K381, and K415 in SEQ ID NO: 1. In some embodiments, the modified BoNT polypeptide comprises an amino acid sequence that is at least 70% (e.g., at least 70%, at least 75%, at least 80%, at least 85%, at least 90%, at least 95%, or at least 99%) identical to SEQ ID NO: 1, and comprises arginine substitutions at positions corresponding to K11, K41, K289, K291, K299, K318, K335, K337, K340, K343, K375, K381, and K415 in SEQ ID NO: 1. In some embodiments, the modified BoNT polypeptide comprises the amino acid sequence of SEQ ID NO: 32. In some embodiments, the modified BoNT polypeptide consists of the amino acid sequence of SEQ ID NO: 32.

[0306] In some embodiments, the modified BoNT polypeptide comprises a modified protease domain of BoNT/A1, a translocation domain of BoNT/A1, and a modified receptor binding domain of BoNT/A1. In some embodiments, the modified BoNT polypeptide comprises an amino acid sequence that is at least 70% (e.g., at least 70%, at least 75%, at least 80%, at least 85%, at least 90%, at least 95%, or at least 99%) identical to SEQ ID NO: 1, and comprises arginine substitutions a positions corresponding to one or more of K11, K41, K289, K291, K299, K318, K335, K337, K340, K343, K375, K381, and K415 in SEQ ID NO: 1 and one or more amino acid substitutions in the receptor binding domain at positions corresponding to 917, 953, 954, 955, 957, 968, 1025, 1026, 1052, 1062, 1063, 1064, 1065, 1066, 1145, 1156, 1232, 1272, 1278, 1288, 1289, 1292, 1294, and 1295 in SEQ ID NO: 1. In some embodiments, the modified BoNT polypeptide comprises an amino acid sequence that is at least 70% (e.g., at least 70%, at least 75%, at least 80%, at least 85%, at least 90%, at least 95%, or at least 99%) identical to SEQ ID NO: 1, and comprises arginine substitutions a positions corresponding to K11, K41, K289, K291, K299, K318, K335, K337, K340, K343, K375, K381, and K415 in SEQ ID NO: 1 and one or more amino acid substitutions in the receptor binding domain at positions corresponding to 917, 953, 954, 955, 957, 968, 1025, 1026, 1052, 1062, 1063, 1064, 1065, 1066, 1145, 1156, 1232, 1272, 1278, 1288, 1289, 1292, 1294, and 1295 in SEQ ID NO: 1. In some embodiments the one or more amino acid substitutions in the receptor binding domain correspond to one or more of F917R or F917K; F953H or F953Y; N954S; S955K; S957N, S957Q or S957Y; M968I; N1025T; N1026K; N1052K; D1062E; T1063P; H1064R or H1064Q; R1065N; Y1066R or Y1066K; T1145Y; R1156M or R1156I; T1232R or T1232K; E1272G; L1278F, L1278Y or L1278W; D1288E or D1288N; D1289Y; G1292R or G1292K; R1294S or R1294T; and P1295S or P1295T in SEQ ID NO: 1. In some embodiments, the receptor binding domain comprises an amino acid substitution at a position corresponding to 1156 or 1232 in SEQ ID NO: 1. In some embodiments, the receptor binding domain comprises an amino acid substitution that corresponds to R1156M or T1232R in SEQ ID NO: 1.

[0307] In some embodiments, the modified BoNT polypeptide comprises a modified protease domain of BoNT/A1, a translocation domain of BoNT/A1, and a modified receptor binding domain of BoNT/A2. In some embodiments, the modified BoNT polypeptide comprises an amino acid sequence that is at least 70% (e.g., at least 70%, at least 75%, at least 80%, at least 85%, at least 90%, at least 95%, or at least 99%) identical to SEQ ID NO: 78 fused to the amino acid sequence of any one of SEQ ID NO: 131-165 or 205, and comprises arginine substitutions at positions corresponding to one or more of K11, K41, K289, K291, K299, K318, K335, K337, K340, K343, K375, K381, and K415 in SEQ ID NO: 1 and one or more amino acid substitutions in the receptor binding domain at positions corresponding to 915, 923, 1090, 1103, 1117, 1156, 1170, 1227, 1254, 1255, or 1256 in SEQ ID NO: 35. In some embodiments, the modified BoNT polypeptide comprises an amino acid sequence that is at least 70% (e.g., at least 70%, at least 75%, at least 80%, at least 85%, at least 90%, at least 95%, or at least 99%) identical to SEQ ID NO: 75 fused to the amino acid sequence of any one of SEQ ID NO: 131-165 or 205, and comprising one or more amino acid substitutions in the receptor binding domain at positions corresponding to 915, 923, 1090, 1103, 1117, 1156, 1170, 1227, 1254, 1255, or 1256 in SEQ ID NO: 35. In some embodiments the one or more amino acid substitutions in the receptor binding domain correspond to one or more of K915Q, T923K, 51090N, N1103D, F1117Y, E1156M, E1170K, D1227N, L1254Q, Y1255G, or D1256N in SEQ ID NO: 35.

[0308] In some embodiments, the modified BoNT polypeptide is a chimeric BoNT comprising a receptor binding domain from a BoNT of a different serotype (e.g., BoNT/B, C, D, E, F, G, H, or EN) fused to a polypeptide comprising the translocation domain of BoNT/A1 and a modified protease domain of BoNT/A1 comprising arginine substitutions at positions corresponding to K11, K41, K289, K291, K299, K318, K335, K337, K340, K343, K375, K381, and K415 in SEQ ID NO: 1. In some embodiments, the modified BoNT polypeptide comprises a polypeptide comprising an amino acid sequence that is at least 70% (e.g., at least 70%, at least 75%, at least 80%, at least 85%, at least 90%, at least 95%, or at least 99%) identical to any one of SEQ ID NOs: 179-186, fused to a polypeptide comprising the translocation domain of BoNT/A1 and a modified protease domain of BoNT/A1 comprising arginine substitutions at positions corresponding to one or more of K11, K41, K289, K291, K299, K318, K335, K337, K340, K343, K375, K381, and K415 in SEQ ID NO: 1. In some embodiments, the modified BoNT polypeptide comprises a polypeptide comprising an amino acid sequence that is at least 70% (e.g., at least 70%, at least 75%, at least 80%, at least 85%, at least 90%, at least 95%, or at least 99%) identical to any one of SEQ ID NOs: 179-186, fused to a polypeptide comprising the translocation domain of BoNT/A1 and a modified protease domain of BoNT/A1 comprising arginine substitutions at positions corresponding to K11, K41, K289, K291, K299, K318, K335, K337, K340, K343, K375, K381, and K415 in SEQ ID NO: 1. In some embodiments, the modified BoNT polypeptide comprises a polypeptide comprising a receptor binding domain amino acid sequence that is at least 70% (e.g., at least 70%, at least 75%, at least 80%, at least 85%, at least 90%, at least 95%, or at least 99%) identical to any one of SEQ ID NOs: 179-186, fused to a polypeptide comprising an amino acid sequence that is at least 70% (e.g., at least 70%, at least 75%, at least 80%, at least 85%, at least 90%, at least 95%, or at least 99%) identical to SEQ ID NO: 44 and comprising arginine substitutions at positions corresponding to K11, K41, K289, K291, K299, K318, K335, K337, K340, K343, K375, K381, and K415 in SEQ ID NO: 1. In some embodiments, the modified BoNT polypeptide comprises a polypeptide comprising the amino acid sequence of any one of SEQ ID NOs: 179-186, fused to a polypeptide comprising the amino acid sequence of SEQ ID NO: 75. In some embodiments, the modified BoNT polypeptide comprises a polypeptide consisting of the amino acid sequence of any one of SEQ ID NOs: 179-186, fused to an amino acid sequence consisting of the amino acid sequence of SEQ ID NO: 75. In some embodiments, the modified BoNT polypeptide comprises the amino acid sequence of any one of SEQ ID NOs: 187-194 having arginine substitutions at positions corresponding to one or more of K11, K41, K289, K291, K299, K318, K335, K337, K340, K343, K375, K381, and K415 in SEQ ID NO: 1. In some embodiments, the modified BoNT polypeptide comprises the amino acid sequence of any one of SEQ ID NOs: 187-194 having arginine substitutions at positions corresponding to K11, K41, K289, K291, K299, K318, K335, K337, K340, K343, K375, K381, and K415 in SEQ ID NO: 1.

[0309] In some embodiments, the modified BoNT polypeptide is a modified protease domain of BoNT/A1 described herein. In some embodiments, the modified BoNT polypeptide comprises an amino acid sequence that is at least 70% (e.g., at least 70%, at least 75%, at least 80%, at least 85%, at least 90%, at least 95%, or at least 99%) identical to SEQ ID NO:1, and comprises arginine substitutions at positions corresponding to one or more of K11, K41, K212, K289, K291, K299, K318, K335, K337, K340, K343, K356, K375, K381, and K415 in SEQ ID NO: 1. In some embodiments, the modified BoNT polypeptide comprises an amino acid sequence that is at least 70% (e.g., at least 70%, at least 75%, at least 80%, at least 85%, at least 90%, at least 95%, or at least 99%) identical to SEQ ID NO:1, and comprises arginine substitutions at positions corresponding to K11, K41, K212, K289, K291, K299, K318, K335, K337, K340, K343, K356, K375, K381, and K415 in SEQ ID NO: 1. In some embodiments, the group of arginine substitutions at positions corresponding to K11, K41, K212, K289, K291, K299, K318, K335, K337, K340, K343, K356, K375, K381, and K415 in SEQ ID NO: 1 is referred to as KR15. In some embodiments, the modified BoNT polypeptide comprises the amino acid sequence of SEQ ID NO: 119. In some embodiments, the modified BoNT polypeptide consists of the amino acid sequence of SEQ ID NO: 119.

[0310] In some embodiments, the modified BoNT polypeptide comprises a modified protease domain of BoNT/A1 and a translocation domain of BoNT/A1. In some embodiments, the modified BoNT polypeptide comprises an amino acid sequence that is at least 70% (e.g., at least 70%, at least 75%, at least 80%, at least 85%, at least 90%, at least 95%, or at least 99%) identical to SEQ ID NO:1, and comprises arginine substitutions a positions corresponding to one or more of K11, K41, K212, K289, K291, K299, K318, K335, K337, K340, K343, K356, K375, K381, and K415 in SEQ ID NO: 1. In some embodiments, the modified BoNT polypeptide comprises an amino acid sequence that is at least 70% (e.g., at least 70%, at least 75%, at least 80%, at least 85%, at least 90%, at least 95%, or at least 99%) identical to SEQ ID NO:1, and comprises arginine substitutions a positions corresponding to K11, K41, K212, K289, K291, K299, K318, K335, K337, K340, K343, K356, K375, K381, and K415 in SEQ ID NO: 1. In some embodiments, the modified BoNT polypeptide comprises the amino acid sequence of SEQ ID NO: 76. In some embodiments, the modified BoNT polypeptide consists of the amino acid sequence of SEQ ID NO: 76.

[0311] In some embodiments, the modified BoNT polypeptide is a full-length BoNT/A1 polypeptide comprising the modified protease domain of BoNT/A1 described herein. In some embodiments, the modified BoNT polypeptide comprises an amino acid sequence that is at least 70% (e.g., at least 70%, at least 75%, at least 80%, at least 85%, at least 90%, at least 95%, or at least 99%) identical to SEQ ID NO: 1, and comprises arginine substitutions at positions corresponding to one or more of K11, K41, K212, K289, K291, K299, K318, K335, K337, K340, K343, K356, K375, K381, and K415 in SEQ ID NO: 1. In some embodiments, the modified BoNT polypeptide comprises an amino acid sequence that is at least 70% (e.g., at least 70%, at least 75%, at least 80%, at least 85%, at least 90%, at least 95%, or at least 99%) identical to SEQ ID NO: 1, and comprises arginine substitutions at positions corresponding to K11, K41, K212, K289, K291, K299, K318, K335, K337, K340, K343, K356, K375, K381, and K415 in SEQ ID NO: 1. In some embodiments, the modified BoNT polypeptide comprises the amino acid sequence of SEQ ID NO: 33. In some embodiments, the modified BoNT polypeptide consists of the amino acid sequence of SEQ ID NO: 33.

[0312] In some embodiments, the modified BoNT polypeptide comprises a modified protease domain of BoNT/A1, a translocation domain of BoNT/A1, and a modified receptor binding domain of BoNT/A1. In some embodiments, the modified BoNT polypeptide comprises an amino acid sequence that is at least 70% (e.g., at least 70%, at least 75%, at least 80%, at least 85%, at least 90%, at least 95%, or at least 99%) identical to SEQ ID NO: 1, and comprises arginine substitutions a positions corresponding to one or more of K11, K41, K212, K289, K291, K299, K318, K335, K337, K340, K343, K356, K375, K381, and K415 in SEQ ID NO: 1 and one or more amino acid substitutions in the receptor binding domain at positions corresponding to 917, 953, 954, 955, 957, 968, 1025, 1026, 1052, 1062, 1063, 1064, 1065, 1066, 1145, 1156, 1232, 1272, 1278, 1288, 1289, 1292, 1294, and 1295 in SEQ ID NO: 1. In some embodiments, the modified BoNT polypeptide comprises an amino acid sequence that is at least 70% (e.g., at least 70%, at least 75%, at least 80%, at least 85%, at least 90%, at least 95%, or at least 99%) identical to SEQ ID NO: 1, and comprises arginine substitutions a positions corresponding to K11, K41, K212, K289, K291, K299, K318, K335, K337, K340, K343, K356, K375, K381, and K415 in SEQ ID NO: 1 and one or more amino acid substitutions in the receptor binding domain at positions corresponding to 917, 953, 954, 955, 957, 968, 1025, 1026, 1052, 1062, 1063, 1064, 1065, 1066, 1145, 1156, 1232, 1272, 1278, 1288, 1289, 1292, 1294, and 1295 in SEQ ID NO: 1. In some embodiments the one or more amino acid substitutions in the receptor binding domain correspond to one or more of F917R or F917K; F953H or F953Y; N954S; S955K; S957N, S957Q or S957Y; M968I; N1025T; N1026K; N1052K; D1062E; T1063P; H1064R or H1064Q; R1065N; Y1066R or Y1066K; T1145Y; R1156M or R1156I; T1232R or T1232K; E1272G; L1278F, L1278Y or L1278W; D1288E or D1288N; D1289Y; G1292R or G1292K; R1294S or R1294T; and P1295S or P1295T in SEQ ID NO: 1. In some embodiments, the receptor binding domain comprises an amino acid substitution at a position corresponding to 1156 or 1232 in SEQ ID NO: 1. In some embodiments, the receptor binding domain comprises an amino acid substitution that corresponds to R1156M or T1232R in SEQ ID NO: 1.

[0313] In some embodiments, the modified BoNT polypeptide comprises a modified protease domain of BoNT/A1, a translocation domain of BoNT/A1, and a modified receptor binding domain of BoNT/A2. In some embodiments, the modified BoNT polypeptide comprises an amino acid sequence that is at least 70% (e.g., at least 70%, at least 75%, at least 80%, at least 85%, at least 90%, at least 95%, or at least 99%) identical to SEQ ID NO: 78 fused to the amino acid sequence of any one of SEQ ID NO: 131-165 or 205, and comprises arginine substitutions at positions corresponding to one or more of K11, K41, K212, K289, K291, K299, K318, K335, K337, K340, K343, K356, K375, K381, and K415 in SEQ ID NO: 1 and one or more amino acid substitutions in the receptor binding domain at positions corresponding to 915, 923, 1090, 1103, 1117, 1156, 1170, 1227, 1254, 1255, or 1256 in SEQ ID NO: 35. In some embodiments, the modified BoNT polypeptide comprises an amino acid sequence that is at least 70% (e.g., at least 70%, at least 75%, at least 80%, at least 85%, at least 90%, at least 95%, or at least 99%) identical to SEQ ID NO: 76 fused to the amino acid sequence of any one of SEQ ID NO: 131-165 or 205, and comprising one or more amino acid substitutions in the receptor binding domain at positions corresponding to 915, 923, 1090, 1103, 1117, 1156, 1170, 1227, 1254, 1255, or 1256 in SEQ ID NO: 35. In some embodiments the one or more amino acid substitutions in the receptor binding domain correspond to one or more of K915Q, T923K, 51090N, N1103D, F1117Y, E1156M, E1170K, D1227N, L1254Q, Y1255G, or D1256N in SEQ ID NO: 35.

[0314] In some embodiments, the modified BoNT polypeptide is a chimeric BoNT comprising a receptor binding domain from a BoNT of a different serotype (e.g., BoNT/B, C, D, E, F, G, H, or EN) fused to a polypeptide comprising the translocation domain of BoNT/A1 and a modified protease domain of BoNT/A1 comprising arginine substitutions at positions corresponding to K11, K41, K212, K289, K291, K299, K318, K335, K337, K340, K343, K356, K375, K381, and K415 in SEQ ID NO: 1. In some embodiments, the modified BoNT polypeptide comprises a polypeptide comprising an amino acid sequence that is at least 70% (e.g., at least 70%, at least 75%, at least 80%, at least 85%, at least 90%, at least 95%, or at least 99%) identical to any one of SEQ ID NOs: 179-186, fused to a polypeptide comprising the translocation domain of BoNT/A1 and a modified protease domain of BoNT/A1 comprising arginine substitutions at positions corresponding to one or more of K11, K41, K212, K289, K291, K299, K318, K335, K337, K340, K343, K356, K375, K381, and K415 in SEQ ID NO: 1. In some embodiments, the modified BoNT polypeptide comprises a polypeptide comprising an amino acid sequence that is at least 70% (e.g., at least 70%, at least 75%, at least 80%, at least 85%, at least 90%, at least 95%, or at least 99%) identical to any one of SEQ ID NOs: 179-186, fused to a polypeptide comprising the translocation domain of BoNT/A1 and a modified protease domain of BoNT/A1 comprising arginine substitutions at positions corresponding to K11, K41, K212, K289, K291, K299, K318, K335, K337, K340, K343, K356, K375, K381, and K415 in SEQ ID NO: 1. In some embodiments, the modified BoNT polypeptide comprises a polypeptide comprising a receptor binding domain amino acid sequence that is at least 70% (e.g., at least 70%, at least 75%, at least 80%, at least 85%, at least 90%, at least 95%, or at least 99%) identical to any one of SEQ ID NOs: 179-186, fused to a polypeptide comprising an amino acid sequence that is at least 70% (e.g., at least 70%, at least 75%, at least 80%, at least 85%, at least 90%, at least 95%, or at least 99%) identical to SEQ ID NO: 44 and comprising arginine substitutions at positions corresponding to K11, K41, K212, K289, K291, K299, K318, K335, K337, K340, K343, K356, K375, K381, and K415 in SEQ ID NO: 1. In some embodiments, the modified BoNT polypeptide comprises a polypeptide comprising the amino acid sequence of any one of SEQ ID NOs: 179-186, fused to a polypeptide comprising the amino acid sequence of SEQ ID NO: 76. In some embodiments, the modified BoNT polypeptide comprises a polypeptide consisting of the amino acid sequence of any one of SEQ ID NOs: 179-186, fused to an amino acid sequence consisting of the amino acid sequence of SEQ ID NO: 76. In some embodiments, the modified BoNT polypeptide comprises the amino acid sequence of any one of SEQ ID NOs: 187-194 having arginine substitutions at positions corresponding to one or more of K11, K41, K212, K289, K291, K299, K318, K335, K337, K340, K343, K356, K375, K381, and K415 in SEQ ID NO: 1. In some embodiments, the modified BoNT polypeptide comprises the amino acid sequence of any one of SEQ ID NOs: 187-194 having arginine substitutions at positions corresponding to K11, K41, K212, K289, K291, K299, K318, K335, K337, K340, K343, K356, K375, K381, and K415 in SEQ ID NO: 1.

[0315] In some embodiments, the modified BoNT polypeptide is a modified protease domain of BoNT/A1 described herein. In some embodiments, the modified BoNT polypeptide comprises an amino acid sequence that is at least 70% (e.g., at least 70%, at least 75%, at least 80%, at least 85%, at least 90%, at least 95%, or at least 99%) identical to SEQ ID NO:1, and comprises arginine substitutions at positions corresponding to one or more of K11, K41, K212, K272, K289, K291, K299, K318, K335, K337, K340, K343, K356, K375, K381, and K415 in SEQ ID NO: 1. In some embodiments, the modified BoNT polypeptide comprises an amino acid sequence that is at least 70% (e.g., at least 70%, at least 75%, at least 80%, at least 85%, at least 90%, at least 95%, or at least 99%) identical to SEQ ID NO:1, and comprises arginine substitutions at positions corresponding to K11, K41, K212, K272, K289, K291, K299, K318, K335, K337, K340, K343, K356, K375, K381, and K415 in SEQ ID NO: 1. In some embodiments, the group of arginine substitutions at positions corresponding to K11, K41, K212, K272, K289, K291, K299, K318, K335, K337, K340, K343, K356, K375, K381, and K415 in SEQ ID NO: 1 is referred to as KR16. In some embodiments, the modified BoNT polypeptide comprises the amino acid sequence of SEQ ID NO: 120. In some embodiments, the modified BoNT polypeptide consists of the amino acid sequence of SEQ ID NO: 120.

[0316] In some embodiments, the modified BoNT polypeptide comprises a modified protease domain of BoNT/A1 and a translocation domain of BoNT/A1. In some embodiments, the modified BoNT polypeptide comprises an amino acid sequence that is at least 70% (e.g., at least 70%, at least 75%, at least 80%, at least 85%, at least 90%, at least 95%, or at least 99%) identical to SEQ ID NO:1, and comprises arginine substitutions a positions corresponding to one or more of K11, K41, K212, K272, K289, K291, K299, K318, K335, K337, K340, K343, K356, K375, K381, and K415 in SEQ ID NO: 1. In some embodiments, the modified BoNT polypeptide comprises an amino acid sequence that is at least 70% (e.g., at least 70%, at least 75%, at least 80%, at least 85%, at least 90%, at least 95%, or at least 99%) identical to SEQ ID NO:1, and comprises arginine substitutions a positions corresponding to K11, K41, K212, K272, K289, K291, K299, K318, K335, K337, K340, K343, K356, K375, K381, and K415 in SEQ ID NO: 1. In some embodiments, the modified BoNT polypeptide comprises the amino acid sequence of SEQ ID NO: 77. In some embodiments, the modified BoNT polypeptide consists of the amino acid sequence of SEQ ID NO: 77.

[0317] In some embodiments, the modified BoNT polypeptide is a full-length BoNT/A1 polypeptide comprising the modified protease domain of BoNT/A1 described herein. In some embodiments, the modified BoNT polypeptide comprises an amino acid sequence that is at least 70% (e.g., at least 70%, at least 75%, at least 80%, at least 85%, at least 90%, at least 95%, or at least 99%) identical to SEQ ID NO: 1, and comprises arginine substitutions at positions corresponding to one or more of K11, K41, K212, K272, K289, K291, K299, K318, K335, K337, K340, K343, K356, K375, K381, and K415 in SEQ ID NO: 1. In some embodiments, the modified BoNT polypeptide comprises an amino acid sequence that is at least 70% (e.g., at least 70%, at least 75%, at least 80%, at least 85%, at least 90%, at least 95%, or at least 99%) identical to SEQ ID NO: 1, and comprises arginine substitutions at positions corresponding to K11, K41, K212, K272, K289, K291, K299, K318, K335, K337, K340, K343, K356, K375, K381, and K415 in SEQ ID NO: 1. In some embodiments, the modified BoNT polypeptide comprises the amino acid sequence of SEQ ID NO: 34. In some embodiments, the modified BoNT polypeptide consists of the amino acid sequence of SEQ ID NO: 34.

[0318] In some embodiments, the modified BoNT polypeptide comprises a modified protease domain of BoNT/A1, a translocation domain of BoNT/A1, and a modified receptor binding domain of BoNT/A1. In some embodiments, the modified BoNT polypeptide comprises an amino acid sequence that is at least 70% (e.g., at least 70%, at least 75%, at least 80%, at least 85%, at least 90%, at least 95%, or at least 99%) identical to SEQ ID NO: 1, and comprises arginine substitutions a positions corresponding to one or more of K11, K41, K212, K272, K289, K291, K299, K318, K335, K337, K340, K343, K356, K375, K381, and K415 in SEQ ID NO: 1 and one or more amino acid substitutions in the receptor binding domain at positions corresponding to 917, 953, 954, 955, 957, 968, 1025, 1026, 1052, 1062, 1063, 1064, 1065, 1066, 1145, 1156, 1232, 1272, 1278, 1288, 1289, 1292, 1294, and 1295 in SEQ ID NO: 1. In some embodiments, the modified BoNT polypeptide comprises an amino acid sequence that is at least 70% (e.g., at least 70%, at least 75%, at least 80%, at least 85%, at least 90%, at least 95%, or at least 99%) identical to SEQ ID NO: 1, and comprises arginine substitutions a positions corresponding to K11, K41, K212, K272, K289, K291, K299, K318, K335, K337, K340, K343, K356, K375, K381, and K415 in SEQ ID NO: 1 and one or more amino acid substitutions in the receptor binding domain at positions corresponding to 917, 953, 954, 955, 957, 968, 1025, 1026, 1052, 1062, 1063, 1064, 1065, 1066, 1145, 1156, 1232, 1272, 1278, 1288, 1289, 1292, 1294, and 1295 in SEQ ID NO: 1. In some embodiments the one or more amino acid substitutions in the receptor binding domain correspond to one or more of F917R or F917K; F953H or F953Y; N954S; S955K; S957N, S957Q or S957Y; M968I; N1025T; N1026K; N1052K; D1062E; T1063P; H1064R or H1064Q; R1065N; Y1066R or Y1066K; T1145Y; R1156M or R1156I; T1232R or T1232K; E1272G; L1278F, L1278Y or L1278W; D1288E or D1288N; D1289Y; G1292R or G1292K; R1294S or R1294T; and P1295S or P1295T in SEQ ID NO: 1. In some embodiments, the receptor binding domain comprises an amino acid substitution at a position corresponding to 1156 or 1232 in SEQ ID NO: 1. In some embodiments, the receptor binding domain comprises an amino acid substitution that corresponds to R1156M or T1232R in SEQ ID NO: 1.

[0319] In some embodiments, the modified BoNT polypeptide comprises a modified protease domain of BoNT/A1, a translocation domain of BoNT/A1, and a modified receptor binding domain of BoNT/A2. In some embodiments, the modified BoNT polypeptide comprises an amino acid sequence that is at least 70% (e.g., at least 70%, at least 75%, at least 80%, at least 85%, at least 90%, at least 95%, or at least 99%) identical to SEQ ID NO: 78 fused to the amino acid sequence of any one of SEQ ID NO: 131-165 or 205, and comprises arginine substitutions at positions corresponding to one or more of K11, K41, K212, K272, K289, K291, K299, K318, K335, K337, K340, K343, K356, K375, K381, and K415 in SEQ ID NO: 1 and one or more amino acid substitutions in the receptor binding domain at positions corresponding to 915, 923, 1090, 1103, 1117, 1156, 1170, 1227, 1254, 1255, or 1256 in SEQ ID NO: 35. In some embodiments, the modified BoNT polypeptide comprises an amino acid sequence that is at least 70% (e.g., at least 70%, at least 75%, at least 80%, at least 85%, at least 90%, at least 95%, or at least 99%) identical to SEQ ID NO: 77 fused to the amino acid sequence of any one of SEQ ID NO: 131-165 or 205, and comprising one or more amino acid substitutions in the receptor binding domain at positions corresponding to 915, 923, 1090, 1103, 1117, 1156, 1170, 1227, 1254, 1255, or 1256 in SEQ ID NO: 35. In some embodiments the one or more amino acid substitutions in the receptor binding domain correspond to one or more of K915Q, T923K, 51090N, N1103D, F1117Y, E1156M, E1170K, D1227N, L1254Q, Y1255G, or D1256N in SEQ ID NO: 35.

[0320] In some embodiments, the modified BoNT polypeptide is a chimeric BoNT comprising a receptor binding domain from a BoNT of a different serotype (e.g., BoNT/B, C, D, E, F, G, H, or EN) fused to a polypeptide comprising the translocation domain of BoNT/A1 and a modified protease domain of BoNT/A1 comprising arginine substitutions at positions corresponding to K11, K41, K212, K272, K289, K291, K299, K318, K335, K337, K340, K343, K356, K375, K381, and K415 in SEQ ID NO: 1. In some embodiments, the modified BoNT polypeptide comprises a polypeptide comprising an amino acid sequence that is at least 70% (e.g., at least 70%, at least 75%, at least 80%, at least 85%, at least 90%, at least 95%, or at least 99%) identical to any one of SEQ ID NOs: 179-186, fused to a polypeptide comprising the translocation domain of BoNT/A1 and a modified protease domain of BoNT/A1 comprising arginine substitutions at positions corresponding to one or more of K11, K41, K212, K272, K289, K291, K299, K318, K335, K337, K340, K343, K356, K375, K381, and K415 in SEQ ID NO: 1. In some embodiments, the modified BoNT polypeptide comprises a polypeptide comprising an amino acid sequence that is at least 70% (e.g., at least 70%, at least 75%, at least 80%, at least 85%, at least 90%, at least 95%, or at least 99%) identical to any one of SEQ ID NOs: 179-186, fused to a polypeptide comprising the translocation domain of BoNT/A1 and a modified protease domain of BoNT/A1 comprising arginine substitutions at positions corresponding to K11, K41, K212, K272, K289, K291, K299, K318, K335, K337, K340, K343, K356, K375, K381, and K415 in SEQ ID NO: 1. In some embodiments, the modified BoNT polypeptide comprises a polypeptide comprising a receptor binding domain amino acid sequence that is at least 70% (e.g., at least 70%, at least 75%, at least 80%, at least 85%, at least 90%, at least 95%, or at least 99%) identical to any one of SEQ ID NOs: 179-186, fused to a polypeptide comprising an amino acid sequence that is at least 70% (e.g., at least 70%, at least 75%, at least 80%, at least 85%, at least 90%, at least 95%, or at least 99%) identical to SEQ ID NO: 44 and comprising arginine substitutions at positions corresponding to K11, K41, K212, K272, K289, K291, K299, K318, K335, K337, K340, K343, K356, K375, K381, and K415 in SEQ ID NO: 1. In some embodiments, the modified BoNT polypeptide comprises a polypeptide comprising the amino acid sequence of any one of SEQ ID NOs: 179-186, fused to a polypeptide comprising the amino acid sequence of SEQ ID NO: 77. In some embodiments, the modified BoNT polypeptide comprises a polypeptide consisting of the amino acid sequence of any one of SEQ ID NOs: 179-186, fused to an amino acid sequence consisting of the amino acid sequence of SEQ ID NO: 77. In some embodiments, the modified BoNT polypeptide comprises the amino acid sequence of any one of SEQ ID NOs: 187-194 having arginine substitutions at positions corresponding to one or more of K11, K41, K212, K272, K289, K291, K299, K318, K335, K337, K340, K343, K356, K375, K381, and K415 in SEQ ID NO: 1. In some embodiments, the modified BoNT polypeptide comprises the amino acid sequence of any one of SEQ ID NOs: 187-194 having arginine substitutions at positions corresponding to K11, K41, K212, K272, K289, K291, K299, K318, K335, K337, K340, K343, K356, K375, K381, and K415 in SEQ ID NO: 1.

[0321] In some embodiments, the modified BoNT polypeptide is a modified protease domain of BoNT/A2 described herein. In some embodiments, the modified BoNT polypeptide comprises an amino acid sequence that is at least 70% (e.g., at least 70%, at least 75%, at least 80%, at least 85%, at least 90%, at least 95%, or at least 99%) identical to SEQ ID NO: 35, and comprises an arginine substitution corresponding to K11 in SEQ ID NO: 35. In some embodiments, the modified BoNT polypeptide comprises the amino acid sequence of SEQ ID NO: 122. In some embodiments, the modified BoNT polypeptide consists of the amino acid sequence of SEQ ID NO: 122.

[0322] In some embodiments, the modified BoNT polypeptide comprises a modified protease domain of BoNT/A2 and a translocation domain of BoNT/A2. In some embodiments, the modified BoNT polypeptide comprises an amino acid sequence that is at least 70% (e.g., at least 70%, at least 75%, at least 80%, at least 85%, at least 90%, at least 95%, or at least 99%) identical to SEQ ID NO: 35, and comprises an arginine substitution corresponding to K11 in SEQ ID NO: 35. In some embodiments, the modified BoNT polypeptide comprises the amino acid sequence of SEQ ID NO: 79. In some embodiments, the modified BoNT polypeptide consists of the amino acid sequence of SEQ ID NO: 79.

[0323] In some embodiments, the modified BoNT polypeptide is a full-length BoNT/A2 polypeptide comprising the modified protease domain of BoNT/A2 described herein. In some embodiments, the modified BoNT polypeptide comprises an amino acid sequence that is at least 70% (e.g., at least 70%, at least 75%, at least 80%, at least 85%, at least 90%, at least 95%, or at least 99%) identical to SEQ ID NO: 35, and comprises an arginine substitution corresponding to K11 in SEQ ID NO: 35. In some embodiments, the modified BoNT polypeptide comprises the amino acid sequence of SEQ ID NO: 36. In some embodiments, the modified BoNT polypeptide consists of the amino acid sequence of SEQ ID NO: 36.

[0324] In some embodiments, the modified BoNT polypeptide comprises a modified protease domain of BoNT/A2, a translocation domain of BoNT/A2, and a modified receptor binding domain of BoNT/A2. In some embodiments, the modified BoNT polypeptide comprises an amino acid sequence that is at least 70% (e.g., at least 70%, at least 75%, at least 80%, at least to 85%, at least 90%, at least 95%, or at least 99%) identical to SEQ ID NO: 35, and comprises an arginine substitution corresponding to K11 in SEQ ID NO: 35 and one or more amino acid substitutions in the receptor binding domain at positions corresponding to 915, 923, 1090, 1103, 1117, 1156, 1170, 1227, 1254, 1255, and 1256 in SEQ ID NO: 35. In some embodiments the one or more amino acid substitutions in the receptor binding domain correspond to one or more of K915Q, T923K, 51090N, N1103D, F1117Y, E1156M, E1170K, D1227N, L1254Q, Y1255G, or D1256N in SEQ ID NO: 35.

[0325] In some embodiments, the modified BoNT polypeptide comprises a modified protease domain of BoNT/A2, a translocation domain of BoNT/A2, and a modified receptor binding domain of BoNT/A1. In some embodiments, the modified BoNT polypeptide comprises an amino acid sequence that is at least 70% (e.g., at least 70%, at least 75%, at least 80%, at least 85%, at least 90%, at least 95%, or at least 99%) identical to SEQ ID NO: 44 fused to the amino acid sequence of any one of SEQ ID NO: 166-176 or 204, and comprises an arginine substitution corresponding to K11 in SEQ ID NO: 35 and one or more amino acid substitutions in the receptor binding domain at positions corresponding to 917, 953, 954, 955, 957, 968, 1025, 1026, 1052, 1062, 1063, 1064, 1065, 1066, 1145, 1156, 1232, 1272, 1278, 1288, 1289, 1292, 1294, and 1295 in SEQ ID NO: 1. In some embodiments, the modified BoNT polypeptide comprises an amino acid sequence that comprises SEQ ID NO: 79 fused to the amino acid sequence of any one of SEQ ID NO: 166-176 or 204, and one or more amino acid substitutions in the receptor binding domain at positions corresponding to 917, 953, 954, 955, 957, 968, 1025, 1026, 1052, 1062, 1063, 1064, 1065, 1066, 1145, 1156, 1232, 1272, 1278, 1288, 1289, 1292, 1294, and 1295 in SEQ ID NO: 1. In some embodiments the one or more amino acid substitutions in the receptor binding domain correspond to one or more of F917R or F917K; F953H or F953Y; N954S; S955K; S957N, S957Q or S957Y; M968I; N1025T; N1026K; N1052K; D1062E; T1063P; H1064R or H1064Q; R1065N; Y1066R or Y1066K; T1145Y; D1288N; D1289Y; G1292R or G1292K; R1294S or R1294T; and P1295S or P1295T in SEQ ID NO: 1 in SEQ ID NO: 1.

[0326] In some embodiments, the modified BoNT polypeptide is a chimeric BoNT a receptor binding domain from a BoNT of a different serotype (e.g., BoNT/B, C, D, E, F, G, H, or EN) fused to a polypeptide comprising the translocation domain of BoNT/A2 and a modified protease domain of BoNT/A2 comprising an arginine substitution corresponding to K11 in SEQ ID NO: 35. In some embodiments, the modified BoNT polypeptide comprises a polypeptide comprising an amino acid sequence that is at least 70% (e.g., at least 70%, at least 75%, at least 80%, at least 85%, at least 90%, at least 95%, or at least 99%) identical to any one of SEQ ID NOs: 179-186, fused to a polypeptide comprising the translocation domain of BoNT/A2 and a modified protease domain of BoNT/A2 comprising an arginine substitution corresponding to K11 in SEQ ID NO: 35. In some embodiments, the modified BoNT polypeptide comprises a polypeptide comprising an amino acid sequence that is at least 70% (e.g., at least 70%, at least 75%, at least 80%, at least 85%, at least 90%, at least 95%, or at least 99%) identical to any one of SEQ ID NOs: 179-186, fused to a polypeptide comprising an amino acid sequence that is at least 70% (e.g., at least 70%, at least 75%, at least 80%, at least 85%, at least 90%, at least 95%, or at least 99%) identical to SEQ ID NO: 78 and comprises an arginine substitution corresponding to K11 in SEQ ID NO: 35. In some embodiments, the modified BoNT polypeptide comprises a polypeptide comprising the amino acid sequence of any one of SEQ ID NOs: 179-186, fused to a polypeptide comprising the amino acid sequence of SEQ ID NO: 79. In some embodiments, the modified BoNT polypeptide comprises a polypeptide consisting of the amino acid sequence of any one of SEQ ID NOs: 179-186, fused to a polypeptide consisting of the amino acid sequence of SEQ ID NO: 79. In some embodiments, the modified BoNT polypeptide comprises the amino acid sequence of any one of SEQ ID NOs: 187-194 having an arginine corresponding to K11 in SEQ ID NO: 35.

[0327] In some embodiments, the modified BoNT polypeptide is a modified protease domain of BoNT/A2 described herein. In some embodiments, the modified BoNT polypeptide comprises an amino acid sequence that is at least 70% (e.g., at least 70%, at least 75%, at least 80%, at least 85%, at least 90%, at least 95%, or at least 99%) identical to SEQ ID NO: 35, and comprises an arginine substitution corresponding to K289 in SEQ ID NO: 35. In some embodiments, the modified BoNT polypeptide comprises the amino acid sequence of SEQ ID NO: 123. In some embodiments, the modified BoNT polypeptide consists of the amino acid sequence of SEQ ID NO: 123.

[0328] In some embodiments, the modified BoNT polypeptide comprises a modified protease domain of BoNT/A2 and a translocation domain of BoNT/A2. In some embodiments, the modified BoNT polypeptide comprises an amino acid sequence that is at least 70% (e.g., at least 70%, at least 75%, at least 80%, at least 85%, at least 90%, at least 95%, or at least 99%) identical to SEQ ID NO: 35, and comprises an arginine substitution corresponding to K289 in SEQ ID NO: 35. In some embodiments, the modified BoNT polypeptide comprises the amino acid sequence of SEQ ID NO: 80. In some embodiments, the modified BoNT polypeptide consists of the amino acid sequence of SEQ ID NO: 80.

[0329] In some embodiments, the modified BoNT polypeptide is a full-length BoNT/A2 polypeptide comprising the modified protease domain of BoNT/A2 described herein. In some embodiments, the modified BoNT polypeptide comprises an amino acid sequence that is at least 70% (e.g., at least 70%, at least 75%, at least 80%, at least 85%, at least 90%, at least 95%, or at least 99%) identical to SEQ ID NO: 35, and comprises an arginine substitution corresponding to K289 in SEQ ID NO: 35. In some embodiments, the modified BoNT polypeptide comprises the amino acid sequence of SEQ ID NO: 37. In some embodiments, the modified BoNT polypeptide consists of the amino acid sequence of SEQ ID NO: 37.

[0330] In some embodiments, the modified BoNT polypeptide comprises a modified protease domain of BoNT/A2, a translocation domain of BoNT/A2, and a modified receptor binding domain of BoNT/A2. In some embodiments, the modified BoNT polypeptide comprises an amino acid sequence that is at least 70% (e.g., at least 70%, at least 75%, at least 80%, at least 85%, at least 90%, at least 95%, or at least 99%) identical to SEQ ID NO: 35, and comprises an arginine substitution corresponding to K289 in SEQ ID NO: 35 and one or more amino acid substitutions in the receptor binding domain at positions corresponding to 915, 923, 1090, 1103, 1117, 1156, 1170, 1227, 1254, 1255, and 1256 in SEQ ID NO: 35. In some embodiments the one or more amino acid substitutions in the receptor binding domain correspond to one or more of K915Q, T923K, 51090N, N1103D, F1117Y, E1156M, E1170K, D1227N, L1254Q, Y1255G, or D1256N in SEQ ID NO: 35.

[0331] In some embodiments, the modified BoNT polypeptide comprises a modified protease domain of BoNT/A2, a translocation domain of BoNT/A2, and a modified receptor binding domain of BoNT/A1. In some embodiments, the modified BoNT polypeptide comprises an amino acid sequence that is at least 70% (e.g., at least 70%, at least 75%, at least 80%, at least 85%, at least 90%, at least 95%, or at least 99%) identical to SEQ ID NO: 44 fused to the amino acid sequence of any one of SEQ ID NO: 166-176 or 204, and comprises an arginine substitution corresponding to K289 in SEQ ID NO: 35 and one or more amino acid substitutions in the receptor binding domain at positions corresponding to 917, 953, 954, 955, 957, 968, 1025, 1026, 1052, 1062, 1063, 1064, 1065, 1066, 1145, 1156, 1232, 1272, 1278, 1288, 1289, 1292, 1294, and 1295 in SEQ ID NO: 1. In some embodiments, the modified BoNT polypeptide comprises an amino acid sequence that comprises SEQ ID NO: 80 fused to the amino acid sequence of any one of SEQ ID NO: 166-176 or 204, and one or more amino acid substitutions in the receptor binding domain at positions corresponding to 917, 953, 954, 955, 957, 968, 1025, 1026, 1052, 1062, 1063, 1064, 1065, 1066, 1145, 1156, 1232, 1272, 1278, 1288, 1289, 1292, 1294, and 1295 in SEQ ID NO: 1. In some embodiments the one or more amino acid substitutions in the receptor binding domain correspond to one or more of F917R or F917K; F953H or F953Y; N954S; S955K; S957N, S957Q or S957Y; M968I; N1025T; N1026K; N1052K; D1062E; T1063P; H1064R or H1064Q; R1065N; Y1066R or Y1066K; T1145Y; R1156M or R1156I; T1232R or T1232K; E1272G; L1278F, L1278Y or L1278W; D1288E or D1288N; D1289Y; G1292R or G1292K; R1294S or R1294T; and P1295S or P1295T in SEQ ID NO: 1 in SEQ ID NO: 1.

[0332] In some embodiments, the modified BoNT polypeptide is a chimeric BoNT a receptor binding domain from a BoNT of a different serotype (e.g., BoNT/B, C, D, E, F, G, H, or EN) fused to a polypeptide comprising the translocation domain of BoNT/A2 and a modified protease domain of BoNT/A2 comprising an arginine substitution corresponding to K289 in SEQ ID NO: 35. In some embodiments, the modified BoNT polypeptide comprises a polypeptide comprising an amino acid sequence that is at least 70% (e.g., at least 70%, at least 75%, at least 80%, at least 85%, at least 90%, at least 95%, or at least 99%) identical to any one of SEQ ID NOs: 179-186, fused to a polypeptide comprising the translocation domain of BoNT/A2 and a modified protease domain of BoNT/A2 comprising an arginine substitution corresponding to K289 in SEQ ID NO: 35. In some embodiments, the modified BoNT polypeptide comprises a polypeptide comprising an amino acid sequence that is at least 70% (e.g., at least 70%, at least 75%, at least 80%, at least 85%, at least 90%, at least 95%, or at least 99%) identical to any one of SEQ ID NOs: 179-186, fused to a polypeptide comprising an amino acid sequence that is at least 70% (e.g., at least 70%, at least 75%, at least 80%, at least 85%, at least 90%, at least 95%, or at least 99%) identical to SEQ ID NO: 78 and comprises an arginine substitution corresponding to K289 in SEQ ID NO: 35. In some embodiments, the modified BoNT polypeptide comprises a polypeptide comprising the amino acid sequence of any one of SEQ ID NOs: 179-186, fused to a polypeptide comprising the amino acid sequence of SEQ ID NO: 80. In some embodiments, the modified BoNT polypeptide comprises a polypeptide consisting of the amino acid sequence of any one of SEQ ID NOs: 179-186, fused to a polypeptide consisting of the amino acid sequence of SEQ ID NO: 80. In some embodiments, the modified BoNT polypeptide comprises the amino acid sequence of any one of SEQ ID NOs: 187-194 having an arginine corresponding to K289 in SEQ ID NO: 35.

[0333] In some embodiments, the modified BoNT polypeptide is a modified protease domain of BoNT/A2 described herein. In some embodiments, the modified BoNT polypeptide comprises an amino acid sequence that is at least 70% (e.g., at least 70%, at least 75%, at least 80%, at least 85%, at least 90%, at least 95%, or at least 99%) identical to SEQ ID NO: 35, and comprises an arginine substitution corresponding to K291 in SEQ ID NO: 35. In some embodiments, the modified BoNT polypeptide comprises the amino acid sequence of SEQ ID NO: 124. In some embodiments, the modified BoNT polypeptide consists of the amino acid sequence of SEQ ID NO: 124.

[0334] In some embodiments, the modified BoNT polypeptide comprises a modified protease domain of BoNT/A2 and a translocation domain of BoNT/A2. In some embodiments, the modified BoNT polypeptide comprises an amino acid sequence that is at least 70% (e.g., at least 70%, at least 75%, at least 80%, at least 85%, at least 90%, at least 95%, or at least 99%) identical to SEQ ID NO: 35, and comprises an arginine substitution corresponding to K291 in SEQ ID NO: 35. In some embodiments, the modified BoNT polypeptide comprises the amino acid sequence of SEQ ID NO: 81. In some embodiments, the modified BoNT polypeptide consists of the amino acid sequence of SEQ ID NO: 81.

[0335] In some embodiments, the modified BoNT polypeptide is a full-length BoNT/A2 polypeptide comprising the modified protease domain of BoNT/A2 described herein. In some embodiments, the modified BoNT polypeptide comprises an amino acid sequence that is at least 70% (e.g., at least 70%, at least 75%, at least 80%, at least 85%, at least 90%, at least 95%, or at least 99%) identical to SEQ ID NO: 35, and comprises an arginine substitution corresponding to K291 in SEQ ID NO: 35. In some embodiments, the modified BoNT polypeptide comprises the amino acid sequence of SEQ ID NO: 38. In some embodiments, the modified BoNT polypeptide consists of the amino acid sequence of SEQ ID NO: 38.

[0336] In some embodiments, the modified BoNT polypeptide comprises a modified protease domain of BoNT/A2, a translocation domain of BoNT/A2, and a modified receptor binding domain of BoNT/A2. In some embodiments, the modified BoNT polypeptide comprises an amino acid sequence that is at least 70% (e.g., at least 70%, at least 75%, at least 80%, at least 85%, at least 90%, at least 95%, or at least 99%) identical to SEQ ID NO: 35, and comprises an arginine substitution corresponding to K291 in SEQ ID NO: 35 and one or more amino acid substitutions in the receptor binding domain at positions corresponding to 915, 923, 1090, 1103, 1117, 1156, 1170, 1227, 1254, 1255, and 1256 in SEQ ID NO: 35. In some embodiments the one or more amino acid substitutions in the receptor binding domain correspond to one or more of K915Q, T923K, S1090N, N1103D, F1117Y, E1156M, E1170K, D1227N, L1254Q, Y1255G, or D1256N in SEQ ID NO: 35.

[0337] In some embodiments, the modified BoNT polypeptide comprises a modified protease domain of BoNT/A2, a translocation domain of BoNT/A2, and a modified receptor binding domain of BoNT/A1. In some embodiments, the modified BoNT polypeptide comprises an amino acid sequence that is at least 70% (e.g., at least 70%, at least 75%, at least 80%, at least 85%, at least 90%, at least 95%, or at least 99%) identical to SEQ ID NO: 44 fused to the amino acid sequence of any one of SEQ ID NO: 166-176 or 204, and comprises an arginine substitution corresponding to K291 in SEQ ID NO: 35 and one or more amino acid substitutions in the receptor binding domain at positions corresponding to 917, 953, 954, 955, 957, 968, 1025, 1026, 1052, 1062, 1063, 1064, 1065, 1066, 1145, 1156, 1232, 1272, 1278, 1288, 1289, 1292, 1294, and 1295 in SEQ ID NO: 1. In some embodiments, the modified BoNT polypeptide comprises an amino acid sequence that comprises SEQ ID NO: 81 fused to the amino acid sequence of any one of SEQ ID NO: 166-176 or 204, and one or more amino acid substitutions in the receptor binding domain at positions corresponding to 917, 953, 954, 955, 957, 968, 1025, 1026, 1052, 1062, 1063, 1064, 1065, 1066, 1145, 1156, 1232, 1272, 1278, 1288, 1289, 1292, 1294, and 1295 in SEQ ID NO: 1. In some embodiments the one or more amino acid substitutions in the receptor binding domain correspond to one or more of F917R or F917K; F953H or F953Y; N954S; S955K; S957N, S957Q or S957Y; M968I; N1025T; N1026K; N1052K; D1062E; T1063P; H1064R or H1064Q; R1065N; Y1066R or Y1066K; T1145Y; R1156M or R1156I; T1232R or T1232K; E1272G; L1278F, L1278Y or L1278W; D1288E or D1288N; D1289Y; G1292R or G1292K; R1294S or R1294T; and P1295S or P1295T in SEQ ID NO: 1 in SEQ ID NO: 1.

[0338] In some embodiments, the modified BoNT polypeptide is a chimeric BoNT a receptor binding domain from a BoNT of a different serotype (e.g., BoNT/B, C, D, E, F, G, H, or EN) fused to a polypeptide comprising the translocation domain of BoNT/A2 and a modified protease domain of BoNT/A2 comprising an arginine substitution corresponding to K291 in SEQ ID NO: 35. In some embodiments, the modified BoNT polypeptide comprises a polypeptide comprising an amino acid sequence that is at least 70% (e.g., at least 70%, at least 75%, at least 80%, at least 85%, at least 90%, at least 95%, or at least 99%) identical to any one of SEQ ID NOs: 179-186, fused to a polypeptide comprising the translocation domain of BoNT/A2 and a modified protease domain of BoNT/A2 comprising an arginine substitution corresponding to K291 in SEQ ID NO: 35. In some embodiments, the modified BoNT polypeptide comprises a polypeptide comprising an amino acid sequence that is at least 70% (e.g., at least 70%, at least 75%, at least 80%, at least 85%, at least 90%, at least 95%, or at least 99%) identical to any one of SEQ ID NOs: 179-186, fused to a polypeptide comprising an amino acid sequence that is at least 70% (e.g., at least 70%, at least 75%, at least 80%, at least 85%, at least 90%, at least 95%, or at least 99%) identical to SEQ ID NO: 78 and comprises an arginine substitution corresponding to K291 in SEQ ID NO: 35. In some embodiments, the modified BoNT polypeptide comprises a polypeptide comprising the amino acid sequence of any one of SEQ ID NOs: 179-186, fused to a polypeptide comprising the amino acid sequence of SEQ ID NO: 81. In some embodiments, the modified BoNT polypeptide comprises a polypeptide consisting of the amino acid sequence of any one of SEQ ID NOs: 179-186, fused to a polypeptide consisting of the amino acid sequence of SEQ ID NO: 81. In some embodiments, the modified BoNT polypeptide comprises the amino acid sequence of any one of SEQ ID NOs: 187-194 having an arginine corresponding to K291 in SEQ ID NO: 35.

[0339] In some embodiments, the modified BoNT polypeptide is a modified protease domain of BoNT/A2 described herein. In some embodiments, the modified BoNT polypeptide comprises an amino acid sequence that is at least 70% (e.g., at least 70%, at least 75%, at least 80%, at least 85%, at least 90%, at least 95%, or at least 99%) identical to SEQ ID NO: 35, and comprises an arginine substitution corresponding to K299 in SEQ ID NO: 35. In some embodiments, the modified BoNT polypeptide comprises the amino acid sequence of SEQ ID NO: 125. In some embodiments, the modified BoNT polypeptide consists of the amino acid sequence of SEQ ID NO: 125.

[0340] In some embodiments, the modified BoNT polypeptide comprises a modified protease domain of BoNT/A2 and a translocation domain of BoNT/A2. In some embodiments, the modified BoNT polypeptide comprises an amino acid sequence that is at least 70% (e.g., at least 70%, at least 75%, at least 80%, at least 85%, at least 90%, at least 95%, or at least 99%) identical to SEQ ID NO: 35, and comprises an arginine substitution corresponding to K299 in SEQ ID NO: 35. In some embodiments, the modified BoNT polypeptide comprises the amino acid sequence of SEQ ID NO: 82. In some embodiments, the modified BoNT polypeptide consists of the amino acid sequence of SEQ ID NO: 82.

[0341] In some embodiments, the modified BoNT polypeptide is a full-length BoNT/A2 polypeptide comprising the modified protease domain of BoNT/A2 described herein. In some embodiments, the modified BoNT polypeptide comprises an amino acid sequence that is at least 70% (e.g., at least 70%, at least 75%, at least 80%, at least 85%, at least 90%, at least 95%, or at least 99%) identical to SEQ ID NO: 35, and comprises an arginine substitution corresponding to K299 in SEQ ID NO: 35. In some embodiments, the modified BoNT polypeptide comprises the amino acid sequence of SEQ ID NO: 39. In some embodiments, the modified BoNT polypeptide consists of the amino acid sequence of SEQ ID NO: 39.

[0342] In some embodiments, the modified BoNT polypeptide comprises a modified protease domain of BoNT/A2, a translocation domain of BoNT/A2, and a modified receptor binding domain of BoNT/A2. In some embodiments, the modified BoNT polypeptide comprises an amino acid sequence that is at least 70% (e.g., at least 70%, at least 75%, at least 80%, at least 85%, at least 90%, at least 95%, or at least 99%) identical to SEQ ID NO: 35, and comprises an arginine substitution corresponding to K299 in SEQ ID NO: 35 and one or more amino acid substitutions in the receptor binding domain at positions corresponding to 915, 923, 1090, 1103, 1117, 1156, 1170, 1227, 1254, 1255, and 1256 in SEQ ID NO: 35. In some embodiments the one or more amino acid substitutions in the receptor binding domain correspond to one or more of K915Q, T923K, 51090N, N1103D, F1117Y, E1156M, E1170K, D1227N, L1254Q, Y1255G, or D1256N in SEQ ID NO: 35.

[0343] In some embodiments, the modified BoNT polypeptide comprises a modified protease domain of BoNT/A2, a translocation domain of BoNT/A2, and a modified receptor binding domain of BoNT/A1. In some embodiments, the modified BoNT polypeptide comprises an amino acid sequence that is at least 70% (e.g., at least 70%, at least 75%, at least 80%, at least 85%, at least 90%, at least 95%, or at least 99%) identical to SEQ ID NO: 44 fused to the amino acid sequence of any one of SEQ ID NO: 166-176 or 204, and comprises an arginine substitution corresponding to K299 in SEQ ID NO: 35 and one or more amino acid substitutions in the receptor binding domain at positions corresponding to 917, 953, 954, 955, 957, 968, 1025, 1026, 1052, 1062, 1063, 1064, 1065, 1066, 1145, 1156, 1232, 1272, 1278, 1288, 1289, 1292, 1294, and 1295 in SEQ ID NO: 1. In some embodiments, the modified BoNT polypeptide comprises an amino acid sequence that comprises SEQ ID NO: 82 fused to the amino acid sequence of any one of SEQ ID NO: 166-176 or 204, and one or more amino acid substitutions in the receptor binding domain at positions corresponding to 917, 953, 954, 955, 957, 968, 1025, 1026, 1052, 1062, 1063, 1064, 1065, 1066, 1145, 1156, 1232, 1272, 1278, 1288, 1289, 1292, 1294, and 1295 in SEQ ID NO: 1. In some embodiments the one or more amino acid substitutions in the receptor binding domain correspond to one or more of F917R or F917K; F953H or F953Y; N954S; S955K; S957N, S957Q or S957Y; M968I; N1025T; N1026K; N1052K; D1062E; T1063P; H1064R or H1064Q; R1065N; Y1066R or Y1066K; T1145Y; R1156M or R1156I; T1232R or T1232K; E1272G; L1278F, L1278Y or L1278W; D1288E or D1288N; D1289Y; G1292R or G1292K; R1294S or R1294T; and P1295S or P1295T in SEQ ID NO: 1 in SEQ ID NO: 1.

[0344] In some embodiments, the modified BoNT polypeptide is a chimeric BoNT a receptor binding domain from a BoNT of a different serotype (e.g., BoNT/B, C, D, E, F, G, H, or EN) fused to a polypeptide comprising the translocation domain of BoNT/A2 and a modified protease domain of BoNT/A2 comprising an arginine substitution corresponding to K299 in SEQ ID NO: 35. In some embodiments, the modified BoNT polypeptide comprises a polypeptide comprising an amino acid sequence that is at least 70% (e.g., at least 70%, at least 75%, at least 80%, at least 85%, at least 90%, at least 95%, or at least 99%) identical to any one of SEQ ID NOs: 179-186, fused to a polypeptide comprising the translocation domain of BoNT/A2 and a modified protease domain of BoNT/A2 comprising an arginine substitution corresponding to K299 in SEQ ID NO: 35. In some embodiments, the modified BoNT polypeptide comprises a polypeptide comprising an amino acid sequence that is at least 70% (e.g., at least 70%, at least 75%, at least 80%, at least 85%, at least 90%, at least 95%, or at least 99%) identical to any one of SEQ ID NOs: 179-186, fused to a polypeptide comprising an amino acid sequence that is at least 70% (e.g., at least 70%, at least 75%, at least 80%, at least 85%, at least 90%, at least 95%, or at least 99%) identical to SEQ ID NO: 78 and comprises an arginine substitution corresponding to K299 in SEQ ID NO: 35. In some embodiments, the modified BoNT polypeptide comprises a polypeptide comprising the amino acid sequence of any one of SEQ ID NOs: 179-186, fused to a polypeptide comprising the amino acid sequence of SEQ ID NO: 82. In some embodiments, the modified BoNT polypeptide comprises a polypeptide consisting of the amino acid sequence of any one of SEQ ID NOs: 179-186, fused to a polypeptide consisting of the amino acid sequence of SEQ ID NO: 82. In some embodiments, the modified BoNT polypeptide comprises the amino acid sequence of any one of SEQ ID NOs: 187-194 having an arginine corresponding to K299 in SEQ ID NO: 35.

[0345] In some embodiments, the modified BoNT polypeptide is a modified protease domain of BoNT/A2 described herein. In some embodiments, the modified BoNT polypeptide comprises an amino acid sequence that is at least 70% (e.g., at least 70%, at least 75%, at least 80%, at least 85%, at least 90%, at least 95%, or at least 99%) identical to SEQ ID NO: 35, and comprises an arginine substitution corresponding to K335 in SEQ ID NO: 35. In some embodiments, the modified BoNT polypeptide comprises the amino acid sequence of SEQ ID NO: 126. In some embodiments, the modified BoNT polypeptide consists of the amino acid sequence of SEQ ID NO: 126.

[0346] In some embodiments, the modified BoNT polypeptide comprises a modified protease domain of BoNT/A2 and a translocation domain of BoNT/A2. In some embodiments, the modified BoNT polypeptide comprises an amino acid sequence that is at least 70% (e.g., at least 70%, at least 75%, at least 80%, at least 85%, at least 90%, at least 95%, or at least 99%) identical to SEQ ID NO: 35, and comprises an arginine substitution corresponding to K335 in SEQ ID NO: 35. In some embodiments, the modified BoNT polypeptide comprises the amino acid sequence of SEQ ID NO: 83. In some embodiments, the modified BoNT polypeptide consists of the amino acid sequence of SEQ ID NO: 83.

[0347] In some embodiments, the modified BoNT polypeptide is a full-length BoNT/A2 polypeptide comprising the modified protease domain of BoNT/A2 described herein. In some embodiments, the modified BoNT polypeptide comprises an amino acid sequence that is at least 70% (e.g., at least 70%, at least 75%, at least 80%, at least 85%, at least 90%, at least 95%, or at least 99%) identical to SEQ ID NO: 35, and comprises an arginine substitution corresponding to K335 in SEQ ID NO: 35. In some embodiments, the modified BoNT polypeptide comprises the amino acid sequence of SEQ ID NO: 40. In some embodiments, the modified BoNT polypeptide consists of the amino acid sequence of SEQ ID NO: 40.

[0348] In some embodiments, the modified BoNT polypeptide comprises a modified protease domain of BoNT/A2, a translocation domain of BoNT/A2, and a modified receptor binding domain of BoNT/A2. In some embodiments, the modified BoNT polypeptide comprises an amino acid sequence that is at least 70% (e.g., at least 70%, at least 75%, at least 80%, at least 85%, at least 90%, at least 95%, or at least 99%) identical to SEQ ID NO: 35, and comprises an arginine substitution corresponding to K335 in SEQ ID NO: 35 and one or more amino acid substitutions in the receptor binding domain at positions corresponding to 915, 923, 1090, 1103, 1117, 1156, 1170, 1227, 1254, 1255, and 1256 in SEQ ID NO: 35. In some embodiments the one or more amino acid substitutions in the receptor binding domain correspond to one or more of K915Q, T923K, 51090N, N1103D, F1117Y, E1156M, E1170K, D1227N, L1254Q, Y1255G, or D1256N in SEQ ID NO: 35.

[0349] In some embodiments, the modified BoNT polypeptide comprises a modified protease domain of BoNT/A2, a translocation domain of BoNT/A2, and a modified receptor binding domain of BoNT/A1. In some embodiments, the modified BoNT polypeptide comprises an amino acid sequence that is at least 70% (e.g., at least 70%, at identical to SEQ ID NO: 44 fused to the amino acid sequence of any one of SEQ ID NO: 166-176 or 204, and comprises an arginine substitution corresponding to K335 in SEQ ID NO: 35 and one or more amino acid substitutions in the receptor binding domain at positions corresponding to 917, 953, 954, 955, 957, 968, 1025, 1026, 1052, 1062, 1063, 1064, 1065, 1066, 1145, 1156, 1232, 1272, 1278, 1288, 1289, 1292, 1294, and 1295 in SEQ ID NO: 1. In some embodiments, the modified BoNT polypeptide comprises an amino acid sequence that comprises SEQ ID NO: 83 fused to the amino acid sequence of any one of SEQ ID NO: 166-176 or 204, and one or more amino acid substitutions in the receptor binding domain at positions corresponding to 917, 953, 954, 955, 957, 968, 1025, 1026, 1052, 1062, 1063, 1064, 1065, 1066, 1145, 1156, 1232, 1272, 1278, 1288, 1289, 1292, 1294, and 1295 in SEQ ID NO: 1. In some embodiments the one or more amino acid substitutions in the receptor binding domain correspond to one or more of F917R or F917K; F953H or F953Y; N954S; S955K; S957N, S957Q or S957Y; M968I; N1025T; N1026K; N1052K; D 1062E; T1063P; H1064R or H1064Q; R1065N; Y1066R or Y1066K; T1145Y; R1156M or R1156I; T1232R or T1232K; E1272G; L1278F, L1278Y or L1278W; D1288E or D1288N; D1289Y; G1292R or G1292K; R1294S or R1294T; and P1295S or P1295T in SEQ ID NO: 1 in SEQ ID NO: 1.

[0350] In some embodiments, the modified BoNT polypeptide is a chimeric BoNT a receptor binding domain from a BoNT of a different serotype (e.g., BoNT/B, C, D, E, F, G, H, or EN) fused to a polypeptide comprising the translocation domain of BoNT/A2 and a modified protease domain of BoNT/A2 comprising an arginine substitution corresponding to K335 in SEQ ID NO: 35. In some embodiments, the modified BoNT polypeptide comprises a polypeptide comprising an amino acid sequence that is at least 70% (e.g., at least 70%, at least 75%, at least 80%, at least 85%, at least 90%, at least 95%, or at least 99%) identical to any one of SEQ ID NOs: 179-186, fused to a polypeptide comprising the translocation domain of BoNT/A2 and a modified protease domain of BoNT/A2 comprising an arginine substitution corresponding to K335 in SEQ ID NO: 35. In some embodiments, the modified BoNT polypeptide comprises a polypeptide comprising an amino acid sequence that is at least 70% (e.g., at least 70%, at least 75%, at least 80%, at least 85%, at least 90%, at least 95%, or at least 99%) identical to any one of SEQ ID NOs: 179-186, fused to a polypeptide comprising an amino acid sequence that is at least 70% (e.g., at least 70%, at least 75%, at least 80%, at least 85%, at least 90%, at least 95%, or at least 99%) identical to SEQ ID NO: 78 and comprises an arginine substitution corresponding to K335 in SEQ ID NO: 35. In some embodiments, the modified BoNT polypeptide comprises a polypeptide comprising the amino acid sequence of any one of SEQ ID NOs: 179-186, fused to a polypeptide comprising the amino acid sequence of SEQ ID NO: 83. In some embodiments, the modified BoNT polypeptide comprises a polypeptide consisting of the amino acid sequence of any one of SEQ ID NOs: 179-186, fused to a polypeptide consisting of the amino acid sequence of SEQ ID NO: 83. In some embodiments, the modified BoNT polypeptide comprises the amino acid sequence of any one of SEQ ID NOs: 187-194 having an arginine corresponding to K335 in SEQ ID NO: 35.

[0351] In some embodiments, the modified BoNT polypeptide is a modified protease domain of BoNT/A2 described herein. In some embodiments, the modified BoNT polypeptide comprises an amino acid sequence that is at least 70% (e.g., at least 70%, at least 75%, at least 80%, at least 85%, at least 90%, at least 95%, or at least 99%) identical to SEQ ID NO: 35, and comprises an arginine substitution corresponding to K337 in SEQ ID NO: 35. In some embodiments, the modified BoNT polypeptide comprises the amino acid sequence of SEQ ID NO: 127. In some embodiments, the modified BoNT polypeptide consists of the amino acid sequence of SEQ ID NO: 127.

[0352] In some embodiments, the modified BoNT polypeptide comprises a modified protease domain of BoNT/A2 and a translocation domain of BoNT/A2. In some embodiments, the modified BoNT polypeptide comprises an amino acid sequence that is at least 70% (e.g., at least 70%, at least 75%, at least 80%, at least 85%, at least 90%, at least 95%, or at least 99%) identical to SEQ ID NO: 35, and comprises an arginine substitution corresponding to K337 in SEQ ID NO: 35. In some embodiments, the modified BoNT polypeptide comprises the amino acid sequence of SEQ ID NO: 84. In some embodiments, the modified BoNT polypeptide consists of the amino acid sequence of SEQ ID NO: 84.

[0353] In some embodiments, the modified BoNT polypeptide is a full-length BoNT/A2 polypeptide comprising the modified protease domain of BoNT/A2 described herein. In some embodiments, the modified BoNT polypeptide comprises an amino acid sequence that is at least 70% (e.g., at least 70%, at least 75%, at least 80%, at least 85%, at least 90%, at least 95%, or at least 99%) identical to SEQ ID NO: 35, and comprises an arginine substitution corresponding to K337 in SEQ ID NO: 35. In some embodiments, the modified BoNT polypeptide comprises the amino acid sequence of SEQ ID NO: 41. In some embodiments, the modified BoNT polypeptide consists of the amino acid sequence of SEQ ID NO: 41.

[0354] In some embodiments, the modified BoNT polypeptide comprises a modified protease domain of BoNT/A2, a translocation domain of BoNT/A2, and a modified receptor binding domain of BoNT/A2. In some embodiments, the modified BoNT polypeptide comprises an amino acid sequence that is at least 70% (e.g., at least 70%, at identical to SEQ ID NO: 35, and comprises an arginine substitution corresponding to K337 in SEQ ID NO: 35 and one or more amino acid substitutions in the receptor binding domain at positions corresponding to 915, 923, 1090, 1103, 1117, 1156, 1170, 1227, 1254, 1255, and 1256 in SEQ ID NO: 35. In some embodiments the one or more amino acid substitutions in the receptor binding domain correspond to one or more of K915Q, T923K, 51090N, N1103D, F1117Y, E1156M, E1170K, D1227N, L1254Q, Y1255G, or D1256N in SEQ ID NO: 35.

[0355] In some embodiments, the modified BoNT polypeptide comprises a modified protease domain of BoNT/A2, a translocation domain of BoNT/A2, and a modified receptor binding domain of BoNT/A1. In some embodiments, the modified BoNT polypeptide comprises an amino acid sequence that is at least 70% (e.g., at least 70%, at least 75%, at least 80%, at least 85%, at least 90%, at least 95%, or at least 99%) identical to SEQ ID NO: 44 fused to the amino acid sequence of any one of SEQ ID NO: 166-176 or 204, and comprises an arginine substitution corresponding to K337 in SEQ ID NO: 35 and one or more amino acid substitutions in the receptor binding domain at positions corresponding to 917, 953, 954, 955, 957, 968, 1025, 1026, 1052, 1062, 1063, 1064, 1065, 1066, 1145, 1156, 1232, 1272, 1278, 1288, 1289, 1292, 1294, and 1295 in SEQ ID NO: 1. In some embodiments, the modified BoNT polypeptide comprises an amino acid sequence that comprises SEQ ID NO: 84 fused to the amino acid sequence of any one of SEQ ID NO: 166-176 or 204, and one or more amino acid substitutions in the receptor binding domain at positions corresponding to 917, 953, 954, 955, 957, 968, 1025, 1026, 1052, 1062, 1063, 1064, 1065, 1066, 1145, 1156, 1232, 1272, 1278, 1288, 1289, 1292, 1294, and 1295 in SEQ ID NO: 1. In some embodiments the one or more amino acid substitutions in the receptor binding domain correspond to one or more of F917R or F917K; F953H or F953Y; N954S; S955K; S957N, S957Q or S957Y; M968I; N1025T; N1026K; N1052K; D1062E; T1063P; H1064R or H1064Q; R1065N; Y1066R or Y1066K; T1145Y; R1156M or R1156I; T1232R or T1232K; E1272G; L1278F, L1278Y or L1278W; D1288E or D1288N; D1289Y; G1292R or G1292K; R1294S or R1294T; and P1295S or P1295T in SEQ ID NO: 1 in SEQ ID NO: 1.

[0356] In some embodiments, the modified BoNT polypeptide is a chimeric BoNT a receptor binding domain from a BoNT of a different serotype (e.g., BoNT/B, C, D, E, F, G, H, or EN) fused to a polypeptide comprising the translocation domain of BoNT/A2 and a modified protease domain of BoNT/A2 comprising an arginine substitution corresponding to K337 in SEQ ID NO: 35. In some embodiments, the modified BoNT polypeptide comprises a polypeptide comprising an amino acid sequence that is at least 70% (e.g., at least 70%, at least 75%, at least 80%, at least 85%, at least 90%, at least 95%, or at least 99%) identical to any one of SEQ ID NOs: 179-186, fused to a polypeptide comprising the translocation domain of BoNT/A2 and a modified protease domain of BoNT/A2 comprising an arginine substitution corresponding to K337 in SEQ ID NO: 35. In some embodiments, the modified BoNT polypeptide comprises a polypeptide comprising an amino acid sequence that is at least 70% (e.g., at least 70%, at least 75%, at least 80%, at least 85%, at least 90%, at least 95%, or at least 99%) identical to any one of SEQ ID NOs: 179-186, fused to a polypeptide comprising an amino acid sequence that is at least 70% (e.g., at least 70%, at least 75%, at least 80%, at least 85%, at least 90%, at least 95%, or at least 99%) identical to SEQ ID NO: 78 and comprises an arginine substitution corresponding to K337 in SEQ ID NO: 35. In some embodiments, the modified BoNT polypeptide comprises a polypeptide comprising the amino acid sequence of any one of SEQ ID NOs: 179-186, fused to a polypeptide comprising the amino acid sequence of SEQ ID NO: 84. In some embodiments, the modified BoNT polypeptide comprises a polypeptide consisting of the amino acid sequence of any one of SEQ ID NOs: 179-186, fused to a polypeptide consisting of the amino acid sequence of SEQ ID NO: 84. In some embodiments, the modified BoNT polypeptide comprises the amino acid sequence of any one of SEQ ID NOs: 187-194 having an arginine corresponding to K337 in SEQ ID NO: 35.

[0357] In some embodiments, the modified BoNT polypeptide is a modified protease domain of BoNT/A2 described herein. In some embodiments, the modified BoNT polypeptide comprises an amino acid sequence that is at least 70% (e.g., at least 70%, at least 75%, at least 80%, at least 85%, at least 90%, at least 95%, or at least 99%) identical to SEQ ID NO: 35, and comprises an arginine substitution corresponding to K343 in SEQ ID NO: 35. In some embodiments, the modified BoNT polypeptide comprises the amino acid sequence of SEQ ID NO: 128. In some embodiments, the modified BoNT polypeptide consists of the amino acid sequence of SEQ ID NO: 128.

[0358] In some embodiments, the modified BoNT polypeptide comprises a modified protease domain of BoNT/A2 and a translocation domain of BoNT/A2. In some embodiments, the modified BoNT polypeptide comprises an amino acid sequence that is at least 70% (e.g., at least 70%, at least 75%, at least 80%, at least 85%, at least 90%, at least 95%, or at least 99%) identical to SEQ ID NO: 35, and comprises an arginine substitution corresponding to K343 in SEQ ID NO: 35. In some embodiments, the modified BoNT polypeptide comprises the amino acid sequence of SEQ ID NO: 85. In some embodiments, the modified BoNT polypeptide consists of the amino acid sequence of SEQ ID NO: 85.

[0359] In some embodiments, the modified BoNT polypeptide is a full-length BoNT/A2 polypeptide comprising the modified protease domain of BoNT/A2 described herein. In some embodiments, the modified BoNT polypeptide comprises an amino acid sequence that is at least 70% (e.g., at least 70%, at least 75%, at least 80%, at least 85%, at least 90%, at least 95%, or at least 99%) identical to SEQ ID NO: 35, and comprises an arginine substitution corresponding to K343 in SEQ ID NO: 35. In some embodiments, the modified BoNT polypeptide comprises the amino acid sequence of SEQ ID NO: 42. In some embodiments, the modified BoNT polypeptide consists of the amino acid sequence of SEQ ID NO: 42.

[0360] In some embodiments, the modified BoNT polypeptide comprises a modified protease domain of BoNT/A2, a translocation domain of BoNT/A2, and a modified receptor binding domain of BoNT/A2. In some embodiments, the modified BoNT polypeptide comprises an amino acid sequence that is at least 70% (e.g., at least 70%, at least 75%, at least 80%, at least 85%, at least 90%, at least 95%, or at least 99%) identical to SEQ ID NO: 35, and comprises an arginine substitution corresponding to K343 in SEQ ID NO: 35 and one or more amino acid substitutions in the receptor binding domain at positions corresponding to 915, 923, 1090, 1103, 1117, 1156, 1170, 1227, 1254, 1255, and 1256 in SEQ ID NO: 35. In some embodiments the one or more amino acid substitutions in the receptor binding domain correspond to one or more of K915Q, T923K, 51090N, N1103D, F1117Y, E1156M, E1170K, D1227N, L1254Q, Y1255G, or D1256N in SEQ ID NO: 35.

[0361] In some embodiments, the modified BoNT polypeptide comprises a modified protease domain of BoNT/A2, a translocation domain of BoNT/A2, and a modified receptor binding domain of BoNT/A1. In some embodiments, the modified BoNT polypeptide comprises an amino acid sequence that is at least 70% (e.g., at least 70%, at least 75%, at least 80%, at least 85%, at least 90%, at least 95%, or at least 99%) identical to SEQ ID NO: 44 fused to the amino acid sequence of any one of SEQ ID NO: 166-176 or 204, and comprises an arginine substitution corresponding to K343 in SEQ ID NO: 35 and one or more amino acid substitutions in the receptor binding domain at positions corresponding to 917, 953, 954, 955, 957, 968, 1025, 1026, 1052, 1062, 1063, 1064, 1065, 1066, 1145, 1156, 1232, 1272, 1278, 1288, 1289, 1292, 1294, and 1295 in SEQ ID NO: 1. In some embodiments, the modified BoNT polypeptide comprises an amino acid sequence that comprises SEQ ID NO: 85 fused to the amino acid sequence of any one of SEQ ID NO: 166-176 or 204, and one or more amino acid substitutions in the receptor binding domain at positions corresponding to 917, 953, 954, 955, 957, 968, 1025, 1026, 1052, 1062, 1063, 1064, 1065, 1066, 1145, 1156, 1232, 1272, 1278, 1288, 1289, 1292, 1294, and 1295 in SEQ ID NO: 1. In some embodiments the one or more amino acid substitutions in the receptor binding domain correspond to one or more of F917R or F917K; F953H or F953Y; N954S; S955K; S957N, S957Q or S957Y; M968I; N1025T; N1026K; N1052K; D1062E; T1063P; H1064R or H1064Q; R1065N; Y1066R or Y1066K; T1145Y; R1156M or R1156I; T1232R or T1232K; E1272G; L1278F, L1278Y or L1278W; D1288E or D1288N; D1289Y; G1292R or G1292K; R1294S or R1294T; and P1295S or P1295T in SEQ ID NO: 1 in SEQ ID NO: 1.

[0362] In some embodiments, the modified BoNT polypeptide is a chimeric BoNT a receptor binding domain from a BoNT of a different serotype (e.g., BoNT/B, C, D, E, F, G, H, or EN) fused to a polypeptide comprising the translocation domain of BoNT/A2 and a modified protease domain of BoNT/A2 comprising an arginine substitution corresponding to K343 in SEQ ID NO: 35. In some embodiments, the modified BoNT polypeptide comprises a polypeptide comprising an amino acid sequence that is at least 70% (e.g., at least 70%, at least 75%, at least 80%, at least 85%, at least 90%, at least 95%, or at least 99%) identical to any one of SEQ ID NOs: 179-186, fused to a polypeptide comprising the translocation domain of BoNT/A2 and a modified protease domain of BoNT/A2 comprising an arginine substitution corresponding to K343 in SEQ ID NO: 35. In some embodiments, the modified BoNT polypeptide comprises a polypeptide comprising an amino acid sequence that is at least 70% (e.g., at least 70%, at least 75%, at least 80%, at least 85%, at least 90%, at least 95%, or at least 99%) identical to any one of SEQ ID NOs: 179-186, fused to a polypeptide comprising an amino acid sequence that is at least 70% (e.g., at least 70%, at least 75%, at least 80%, at least 85%, at least 90%, at least 95%, or at least 99%) identical to SEQ ID NO: 78 and comprises an arginine substitution corresponding to K343 in SEQ ID NO: 35. In some embodiments, the modified BoNT polypeptide comprises a polypeptide comprising the amino acid sequence of any one of SEQ ID NOs: 179-186, fused to a polypeptide comprising the amino acid sequence of SEQ ID NO: 85. In some embodiments, the modified BoNT polypeptide comprises a polypeptide consisting of the amino acid sequence of any one of SEQ ID NOs: 179-186, fused to a polypeptide consisting of the amino acid sequence of SEQ ID NO: 85. In some embodiments, the modified BoNT polypeptide comprises the amino acid sequence of any one of SEQ ID NOs: 187-194 having an arginine corresponding to K343 in SEQ ID NO: 35.

[0363] In some embodiments, the modified BoNT polypeptide is a modified protease domain of BoNT/A2 described herein. In some embodiments, the modified BoNT polypeptide comprises an amino acid sequence that is at least 70% (e.g., at least 70%, at least 75%, at least 80%, at least 85%, at least 90%, at least 95%, or at least 99%) identical to SEQ ID NO: 35, and comprises arginine substitutions at positions corresponding to one or more of K11, K289, K291, K299, K335, K337, and K343 in SEQ ID NO: 35. In some embodiments, the modified BoNT polypeptide comprises an amino acid sequence that is at least 70% (e.g., at least 70%, at least 75%, at least 80%, at least 85%, at least 90%, at least 95%, or at least 99%) identical to SEQ ID NO: 35, and comprises arginine substitutions at positions corresponding to K11, K289, K291, K299, K335, K337, and K343 in SEQ ID NO: 35. In some embodiments, the group of arginine substitutions at positions corresponding to K11, K289, K291, K299, K335, K337, and K343 in SEQ ID NO: 35 is referred to as KR7. In some embodiments, the modified BoNT polypeptide comprises the amino acid sequence of SEQ ID NO: 129. In some embodiments, the modified BoNT polypeptide consists of the amino acid sequence of SEQ ID NO: 129.

[0364] In some embodiments, the modified BoNT polypeptide comprises a modified protease domain of BoNT/A2 and a translocation domain of BoNT/A2. In some embodiments, the modified BoNT polypeptide comprises an amino acid sequence that is at least 70% (e.g., at least 70%, at least 75%, at least 80%, at least 85%, at least 90%, at least 95%, or at least 99%) identical to SEQ ID NO: 35, and comprises arginine substitutions a positions corresponding to one or more of K11, K289, K291, K299, K335, K337, and K343 in SEQ ID NO: 35. In some embodiments, the modified BoNT polypeptide comprises an amino acid sequence that is at least 70% (e.g., at least 70%, at least 75%, at least 80%, at least 85%, at least 90%, at least 95%, or at least 99%) identical to SEQ ID NO: 35, and comprises arginine substitutions a positions corresponding to K11, K289, K291, K299, K335, K337, and K343 in SEQ ID NO: 35. In some embodiments, the modified BoNT polypeptide comprises the amino acid sequence of SEQ ID NO: 86. In some embodiments, the modified BoNT polypeptide consists of the amino acid sequence of SEQ ID NO: 86.

[0365] In some embodiments, the modified BoNT polypeptide is a full-length BoNT/A2 polypeptide comprising the modified protease domain of BoNT/A2 described herein. In some embodiments, the modified BoNT polypeptide comprises an amino acid sequence that is at least 70% (e.g., at least 70%, at least 75%, at least 80%, at least 85%, at least 90%, at least 95%, or at least 99%) identical to SEQ ID NO: 35, and comprises arginine substitutions at positions corresponding to one or more of K11, K289, K291, K299, K335, K337, and K343 in SEQ ID NO: 35. In some embodiments, the modified BoNT polypeptide comprises an amino acid sequence that is at least 70% (e.g., at least 70%, at least 75%, at least 80%, at least 85%, at least 90%, at least 95%, or at least 99%) identical to SEQ ID NO: 35, and comprises arginine substitutions at positions corresponding to K11, K289, K291, K299, K335, K337, and K343 in SEQ ID NO: 35. In some embodiments, the modified BoNT polypeptide comprises the amino acid sequence of SEQ ID NO: 43. In some embodiments, the modified BoNT polypeptide consists of the amino acid sequence of SEQ ID NO: 43.

[0366] In some embodiments, the modified BoNT polypeptide comprises a modified protease domain of BoNT/A2, a translocation domain of BoNT/A2, and a modified receptor binding domain of BoNT/A2. In some embodiments, the modified BoNT polypeptide comprises an amino acid sequence that is at least 70% (e.g., at least 70%, at least 75%, at least 80%, at least 85%, at least 90%, at least 95%, or at least 99%) identical to SEQ ID NO: 35, and comprises arginine substitutions a positions corresponding to one or more of K11, K289, K291, K299, K335, K337, and K343 in SEQ ID NO: 35 and one or more amino acid substitutions in the receptor binding domain at positions corresponding to 915, 923, 1090, 1103, 1117, 1156, 1170, 1227, 1254, 1255, and 1256 in SEQ ID NO: 35. In some embodiments, the modified BoNT polypeptide comprises an amino acid sequence that is at least 70% (e.g., at least 70%, at least 75%, at least 80%, at least 85%, at least 90%, at least 95%, or at least 99%) identical to SEQ ID NO: 35, and comprises arginine substitutions a positions corresponding to K11, K289, K291, K299, K335, K337, and K343 in SEQ ID NO: 35 and one or more amino acid substitutions in the receptor binding domain at positions corresponding to 915, 923, 1090, 1103, 1117, 1156, 1170, 1227, 1254, 1255, and 1256 in SEQ ID NO: 35. In some embodiments the one or more amino acid substitutions in the receptor binding domain correspond to one or more of K915Q, T923K, 51090N, N1103D, F1117Y, E1156M, E1170K, D1227N, L1254Q, Y1255G, or D1256N in SEQ ID NO: 35.

[0367] In some embodiments, the modified BoNT polypeptide comprises a modified protease domain of BoNT/A2, a translocation domain of BoNT/A2, and a modified receptor binding domain of BoNT/A1. In some embodiments, the modified BoNT polypeptide comprises an amino acid sequence that is at least 70% (e.g., at least 70%, at least 75%, at least 80%, at least 85%, at least 90%, at least 95%, or at least 99%) identical to SEQ ID NO: 44 fused to the amino acid sequence of any one of SEQ ID NO: 166-176 or 204, and comprises arginine substitutions at positions corresponding to one or more of K11, K289, K291, K299, K335, K337, and K343 in SEQ ID NO: 35 and one or more amino acid substitutions in the receptor binding domain at positions corresponding to 917, 953, 954, 955, 957, 968, 1025, 1026, 1052, 1062, 1063, 1064, 1065, 1066, 1145, 1156, 1232, 1272, 1278, 1288, 1289, 1292, 1294, and 1295 in SEQ ID NO: 1. In some embodiments, the modified BoNT polypeptide comprises an amino acid sequence that is at least 70% (e.g., at least 70%, at least 75%, at least 80%, at least 85%, at least 90%, at least 95%, or at least 99%) identical to SEQ ID NO: 86 fused to the amino acid sequence of any one of SEQ ID NO: 166-176 or 204, and comprising one or more amino acid substitutions in the receptor binding domain at positions corresponding to 917, 953, 954, 955, 957, 968, 1025, 1026, 1052, 1062, 1063, 1064, 1065, 1066, 1145, 1156, 1232, 1272, 1278, 1288, 1289, 1292, 1294, and 1295 in SEQ ID NO: 1. In some embodiments the one or more amino acid substitutions in the receptor binding domain correspond to one or more of F917R or F917K; F953H or F953Y; N954S; S955K; S957N, S957Q or S957Y; M968I; N1025T; N1026K; N1052K; D1062E; T1063P; H1064R or H1064Q; R1065N; Y1066R or Y1066K; T1145Y; R1156M or R1156I; T1232R or T1232K; E1272G; L1278F, L1278Y or L1278W; D1288E or D1288N; D1289Y; G1292R or G1292K; R1294S or R1294T; and P1295S or P1295T in SEQ ID NO: 1.

[0368] In some embodiments, the modified BoNT polypeptide is a chimeric BoNT comprising a receptor binding domain from a BoNT of a different serotype (e.g., BoNT/B, C, D, E, F, G, H, or EN) fused to a polypeptide comprising the translocation domain of BoNT/A2 and a modified protease domain of BoNT/A2 comprising arginine substitutions at positions corresponding to K11, K289, K291, K299, K335, K337, and K343 in SEQ ID NO: 35. In some embodiments, the modified BoNT polypeptide comprises a polypeptide comprising an amino acid sequence that is at least 70% (e.g., at least 70%, at least 75%, at least 80%, at least 85%, at least 90%, at least 95%, or at least 99%) identical to any one of SEQ ID NOs: 179-186, fused to a polypeptide comprising the translocation domain of BoNT/A2 and a modified protease domain of BoNT/A2 comprising arginine substitutions at positions corresponding to one or more of K11, K289, K291, K299, K335, K337, and K343 in SEQ ID NO: 35. In some embodiments, the modified BoNT polypeptide comprises a polypeptide comprising an amino acid sequence that is at least 70% (e.g., at least 70%, at least 75%, at least 80%, at least 85%, at least 90%, at least 95%, or at least 99%) identical to any one of SEQ ID NOs: 179-186, fused to a polypeptide comprising the translocation domain of BoNT/A2 and a modified protease domain of BoNT/A2 comprising arginine substitutions at positions corresponding to K11, K289, K291, K299, K335, K337, and K343 in SEQ ID NO: 35. In some embodiments, the modified BoNT polypeptide comprises a polypeptide comprising a receptor binding domain amino acid sequence that is at least 70% (e.g., at least 70%, at least 75%, at least 80%, at least 85%, at least 90%, at least 95%, or at least 99%) identical to any one of SEQ ID NOs: 179-186, fused to a polypeptide comprising an amino acid sequence that is at least 70% (e.g., at least 70%, at least 75%, at least 80%, at least 85%, at least 90%, at least 95%, or at least 99%) identical to SEQ ID NO: 78 and comprising arginine substitutions at positions corresponding to K11, K289, K291, K299, K335, K337, and K343 in SEQ ID NO: 35. In some embodiments, the modified BoNT polypeptide comprises a polypeptide comprising the amino acid sequence of any one of SEQ ID NOs: 179-186, fused to a polypeptide comprising the amino acid sequence of SEQ ID NO: 86. In some embodiments, the modified BoNT polypeptide comprises a polypeptide consisting of the amino acid sequence of any one of SEQ ID NOs: 179-186, fused to an amino acid sequence consisting of the amino acid sequence of SEQ ID NO: 86. In some embodiments, the modified BoNT polypeptide comprises the amino acid sequence of any one of SEQ ID NOs: 187-194 having arginine substitutions at positions corresponding to one or more of K11, K289, K291, K299, K335, K337, and K343 in SEQ ID NO: 35. In some embodiments, the modified BoNT polypeptide comprises the amino acid sequence of any one of SEQ ID NOs: 187-194 having arginine substitutions at positions corresponding to K11, K289, K291, K299, K335, K337, and K343 in SEQ ID NO: 35.

[0369] Some aspects of the present disclosure provide modified Clostridial Botulinum neurotoxin (BoNT) polypeptides comprising a modified protease domain and a modified receptor binding domain of Clostridial Botulinum serotype A1 (BoNT/A1). In some embodiments, the modified protease domain comprises any one of the modified protease domains of BoNT/A1 described herein and the modified receptor binding domain of BoNT/A1 comprises one or more amino acid substitutions at positions corresponding to 917, 953, 954, 955, 957, 968, 1025, 1026, 1052, 1062, 1063, 1064, 1065, 1066, 1145, 1156, 1232, 1272, 1278, 1288, 1289, 1292, 1294, and 1295 in SEQ ID NO: 1. In some embodiments, the modified receptor binding domain of BoNT/A1 comprises one or more amino acid substitutions at positions corresponding to 954, 955, 957, 1063, 1064, 1025, 1026, 1156, 1232, 1278, 1294, and 1295 in SEQ ID NO: 1.

[0370] In some embodiments, the modified BoNT comprising a modified protease domain further comprises a modified receptor binding domain comprising an amino acid substitution at a position corresponding to 917 in SEQ ID NO: 1. In some embodiments, the modified receptor binding domain comprises an amino acid substitution corresponding to F917R or F917K in SEQ ID NO: 1.

[0371] In some embodiments, the modified BoNT comprising a modified protease domain further comprises a modified receptor binding domain comprising an amino acid substitution at a position corresponding to 953 in SEQ ID NO: 1. In some embodiments, the modified receptor binding domain comprises an amino acid substitution corresponding to F953H or F953Y in SEQ ID NO: 1.

[0372] In some embodiments, the modified BoNT comprising a modified protease domain further comprises a modified receptor binding domain comprising an amino acid substitution at a position corresponding to 954 in SEQ ID NO: 1. In some embodiments, the modified receptor binding domain comprises an amino acid substitution corresponding to N954S in SEQ ID NO: 1.

[0373] In some embodiments, the modified BoNT comprising a modified protease domain further comprises a modified receptor binding domain comprising an amino acid substitution at a position corresponding to 955 in SEQ ID NO: 1. In some embodiments, the modified receptor binding domain comprises an amino acid substitution corresponding to S955K in SEQ ID NO: 1.

[0374] In some embodiments, the modified BoNT comprising a modified protease domain further comprises a modified receptor binding domain comprising an amino acid substitution at a position corresponding to 957 in SEQ ID NO: 1. In some embodiments, the modified receptor binding domain comprises an amino acid substitution corresponding to S957N in SEQ ID NO: 1.

[0375] In some embodiments, the modified BoNT comprising a modified protease domain further comprises a modified receptor binding domain comprising an amino acid substitution at a position corresponding to 968 in SEQ ID NO: 1. In some embodiments, the modified receptor binding domain comprises an amino acid substitution corresponding to M968I in SEQ ID NO: 1.

[0376] In some embodiments, the modified BoNT comprising a modified protease domain further comprises a modified receptor binding domain comprising an amino acid substitution at a position corresponding to 1025 in SEQ ID NO: 1. In some embodiments, the modified receptor binding domain comprises an amino acid substitution corresponding to N1025T in SEQ ID NO: 1.

[0377] In some embodiments, the modified BoNT comprising a modified protease domain further comprises a modified receptor binding domain comprising an amino acid substitution at a position corresponding to 1026 in SEQ ID NO: 1. In some embodiments, the modified receptor binding domain comprises an amino acid substitution corresponding to N1026K in SEQ ID NO: 1.

[0378] In some embodiments, the modified BoNT comprising a modified protease domain further comprises a modified receptor binding domain comprising an amino acid substitution at a position corresponding to 1052 in SEQ ID NO: 1. In some embodiments, the modified receptor binding domain comprises an amino acid substitution corresponding to N1052K in SEQ ID NO: 1.

[0379] In some embodiments, the modified BoNT comprising a modified protease domain further comprises a modified receptor binding domain comprising an amino acid substitution at a position corresponding to 1062 in SEQ ID NO: 1. In some embodiments, the modified receptor binding domain comprises an amino acid substitution corresponding to D1062E in SEQ ID NO: 1.

[0380] In some embodiments, the modified BoNT comprising a modified protease domain further comprises a modified receptor binding domain comprising an amino acid substitution at a position corresponding to 1063 in SEQ ID NO: 1. In some embodiments, the modified receptor binding domain comprises an amino acid substitution corresponding to T1063P in SEQ ID NO: 1.

[0381] In some embodiments, the modified BoNT comprising a modified protease domain further comprises a modified receptor binding domain comprising an amino acid substitution at a position corresponding to 1064 in SEQ ID NO: 1. In some embodiments, the modified receptor binding domain comprises an amino acid substitution corresponding to H1064R or H1064Q in SEQ ID NO: 1.

[0382] In some embodiments, the modified BoNT comprising a modified protease domain further comprises a modified receptor binding domain comprising an amino acid substitution at a position corresponding to 1065 in SEQ ID NO: 1. In some embodiments, the modified receptor binding domain comprises an amino acid substitution corresponding to R1065N in SEQ ID NO: 1. These modified receptor binding domains can be referred to as BoNT/A1-R1065* (any amino acid substitution at position corresponding to 1064) and BoNT/A1-R1065N.

[0383] In some embodiments, the modified BoNT comprising a modified protease domain further comprises a modified receptor binding domain comprising an amino acid substitution at a position corresponding to 1066 in SEQ ID NO: 1. In some embodiments, the modified receptor binding domain comprises an amino acid substitution corresponding to Y1066R or Y1066K in SEQ ID NO: 1.

[0384] In some embodiments, the modified BoNT comprising a modified protease domain further comprises a modified receptor binding domain comprising an amino acid substitution at a position corresponding to 1145 in SEQ ID NO: 1. In some embodiments, the modified receptor binding domain comprises an amino acid substitution corresponding to T1145Y in SEQ ID NO: 1.

[0385] In some embodiments, the modified BoNT comprising a modified protease domain further comprises a modified receptor binding domain comprising an amino acid substitution at a position corresponding to 1232 in SEQ ID NO: 1. In some embodiments, the modified receptor binding domain comprises an amino acid substitution corresponding to T1232R or T1232K in SEQ ID NO: 1. In some embodiments, the modified BoNT comprising a modified protease domain further comprises a modified receptor binding domain comprises SEQ ID NO: 178 or SEQ ID NO: 219. In some embodiments, the modified BoNT comprising a modified protease domain further comprises a modified receptor binding domain consists of SEQ ID NO: 178 or SEQ ID NO: 219.

[0386] In some embodiments, the modified BoNT comprising a modified protease domain further comprises a modified receptor binding domain comprising an amino acid substitution at a position corresponding to 1272 in SEQ ID NO: 1. In some embodiments, the modified receptor binding domain comprises an amino acid substitution corresponding to E1272G in SEQ ID NO: 1.

[0387] In some embodiments, the modified BoNT comprising a modified protease domain further comprises a modified receptor binding domain comprising an amino acid substitution at a position corresponding to 1278 in SEQ ID NO: 1. In some embodiments, the modified receptor binding domain comprises an amino acid substitution corresponding to L1278F, L1278Y or L1278W in SEQ ID NO: 1.

[0388] In some embodiments, the modified BoNT comprising a modified protease domain further comprises a modified receptor binding domain comprising an amino acid substitution at a position corresponding to 1288 in SEQ ID NO: 1. In some embodiments, the modified receptor binding domain comprises an amino acid substitution corresponding to D1288E in SEQ ID NO: 1.

[0389] In some embodiments, the modified BoNT comprising a modified protease domain further comprises a modified receptor binding domain comprising an amino acid substitution at a position corresponding to 1289 in SEQ ID NO: 1. In some embodiments, the modified receptor binding domain comprises an amino acid substitution corresponding to D1289Y in SEQ ID NO: 1.

[0390] In some embodiments, the modified BoNT comprising a modified protease domain further comprises a modified receptor binding domain comprising an amino acid substitution at a position corresponding to 1292 in SEQ ID NO: 1. In some embodiments, the modified receptor binding domain comprises an amino acid substitution corresponding to G1292R or G1292K in SEQ ID NO: 1.

[0391] In some embodiments, the modified BoNT comprising a modified protease domain further comprises a modified receptor binding domain comprising an amino acid substitution at a position corresponding to R1294S in SEQ ID NO: 1. In some embodiments, the modified receptor binding domain comprises an amino acid substitution corresponding to R1294S or R1294T in SEQ ID NO: 1.

[0392] In some embodiments, the modified BoNT comprising a modified protease domain further comprises a modified receptor binding domain comprising an amino acid substitution at a position corresponding to 1295 in SEQ ID NO: 1. In some embodiments, the modified receptor binding domain comprises an amino acid substitution corresponding to P1295S or P1295T in SEQ ID NO: 1.

[0393] In some embodiments, the modified BoNT comprising a modified protease domain further comprises a modified receptor binding domain comprising an amino acid substitution at a position corresponding to 1156 in SEQ ID NO: 1. In some embodiments, the modified receptor binding domain comprises an amino acid substitution corresponding to R1156M or R1156I in SEQ ID NO: 1. In some embodiments, the modified BoNT comprising a modified protease domain further comprises a modified receptor binding domain comprises SEQ ID NO: 177 or SEQ ID NO: 218. In some embodiments, the modified BoNT comprising a modified protease domain further comprises a modified receptor binding domain consists of SEQ ID NO: 177 or SEQ ID NO: 218.

[0394] Some aspects of the present disclosure provide modified Clostridial Botulinum neurotoxin (BoNT) polypeptides comprising any one of the modified protease domains described herein and a modified receptor binding domain of Clostridial Botulinum serotype A2 (BoNT/A2). In some embodiments, the modified receptor binding domain of BoNT/A2 comprises one or more amino acid substitutions at positions corresponding to 915, 923, 1090, 1103, 1117, 1156, 1170, 1227, 1254, 1255, or 1256 in SEQ ID NO: 2. in SEQ ID NO: 2. In some embodiments, the one or more amino acid substitutions in the modified receptor binding domain of BoNT/A2 correspond to one or more of K915Q, T923K, 51090N, N1103D, F1117Y, E1156M, E1170K, D1227N, L1254Q, Y1255G, or D1256N in SEQ ID NO: 2.

[0395] In some embodiments, the modified BoNT comprising a modified protease domain further comprises a modified receptor binding domain comprising an amino acid substitution at a position corresponding to 915 in SEQ ID NO: 2. In some embodiments, the modified receptor binding domain comprises an amino acid substitution corresponding to K915Q in SEQ ID NO: 2.

[0396] In some embodiments, the modified BoNT comprising a modified protease domain further comprises a modified receptor binding domain comprising an amino acid substitution at a position corresponding to 923 in SEQ ID NO: 2. In some embodiments, the modified receptor binding domain comprises an amino acid substitution corresponding to T923K in SEQ ID NO: 2.

[0397] In some embodiments, the modified BoNT comprising a modified protease domain further comprises a modified receptor binding domain comprising an amino acid substitution at a position corresponding to 1090 in SEQ ID NO: 2. In some embodiments, the modified receptor binding domain comprises an amino acid substitution corresponding to 51090N in SEQ ID NO: 2.

[0398] In some embodiments, the modified BoNT comprising a modified protease domain further comprises a modified receptor binding domain comprising an amino acid substitution at a position corresponding to 1103 in SEQ ID NO: 2. In some embodiments, the modified receptor binding domain comprises an amino acid substitution corresponding to N1103D in SEQ ID NO: 2.

[0399] In some embodiments, the modified BoNT comprising a modified protease domain further comprises a modified receptor binding domain comprising an amino acid substitution at a position corresponding to 1117 in SEQ ID NO: 2. In some embodiments, the modified receptor binding domain comprises an amino acid substitution corresponding to F1117Y in SEQ ID NO: 2.

[0400] In some embodiments, the modified BoNT comprising a modified protease domain further comprises a modified receptor binding domain comprising an amino acid substitution at a position corresponding to 1156 in SEQ ID NO: 2. In some embodiments, the modified receptor binding domain comprises an amino acid substitution corresponding to E1156M in SEQ ID NO: 2.

[0401] In some embodiments, the modified BoNT comprising a modified protease domain further comprises a modified receptor binding domain comprising an amino acid substitution at a position corresponding to 1170 in SEQ ID NO: 2. In some embodiments, the modified receptor binding domain comprises an amino acid substitution corresponding to E1170K in SEQ ID NO: 2.

[0402] In some embodiments, the modified BoNT comprising a modified protease domain further comprises a modified receptor binding domain comprising an amino acid substitution at a position corresponding to 1227 in SEQ ID NO: 2. In some embodiments, the modified receptor binding domain comprises an amino acid substitution corresponding to D1227N in SEQ ID NO: 2.

[0403] In some embodiments, the modified BoNT comprising a modified protease domain further comprises a modified receptor binding domain comprising an amino acid substitution at a position corresponding to 1254 in SEQ ID NO: 2. In some embodiments, the modified receptor binding domain comprises an amino acid substitution corresponding to L1254Q in SEQ ID NO: 2.

[0404] In some embodiments, the modified BoNT comprising a modified protease domain further comprises a modified receptor binding domain comprising an amino acid substitution at a position corresponding to 1255 in SEQ ID NO: 2. In some embodiments, the modified receptor binding domain comprises an amino acid substitution corresponding to Y1255F in SEQ ID NO: 2.

[0405] In some embodiments, the modified BoNT comprising a modified protease domain further comprises a modified receptor binding domain comprising an amino acid substitution at a position corresponding to 1256 in SEQ ID NO: 2. In some embodiments, the modified receptor binding domain comprises an amino acid substitution corresponding to D1256N in SEQ ID NO: 2.

[0406] In some embodiments, the modified BoNT polypeptides of the present comprise a protease domain (LC), a linker region, a translocation domain (H_{N}), and a receptor binding domain (H_{C}), wherein the linker region is located between the protease domain and the translocation domain. BoNTs are initially produced as single polypeptide and activated via the cleavage of the linker region between LC and HN either bacterial or host proteases. This process is known as “activation” and is essential for the activity the modified BoNT polypeptides described herein. After the cleavage, the LC and H remain connected via an inter-chain disulfide bond prior to translocation of LC into the cytosol of cells, where the disulfide bond is reduced in order to release the LC into the cytosol.

[0407] Further contemplated herein are modified BoNT polypeptides comprising a modified linker region, wherein the linker region comprises a specific protease cleavage site. A “specific protease cleavage site,” as used herein, refers to a recognition and cleavage site for a specification protease, as opposed to a sequence that is recognized and cleavage by more than one non-specific proteases. Such specific proteases include, without limitation: thrombin, TEV, PreScission, Factor Xa, MMP-12, MMP-13, MMP-17, MMP-20, Granzyme-B, and Enterokinase.

[0408] In some embodiments, the cleavage site of the specific proteases may be added to the linker region of a modified BoNT polypeptide described herein (e.g., SEQ ID NOs: 2-34, 36-43, 45-77, 79-86, 88-120, 122-129, 131-203, 213-216) via insertion or replacement of the existing amino acids in the linker region (e.g. replace amino acids 430-454 of modified BoNT polypeptides comprising the LC-H_{N} domain of BoNT/A1 and amino acids 430-454 of modified BoNT polypeptides comprising the LC-H_{N} domain of BoNT/A2). The sequences of the specific protease cleavage sites sequences are also provided: LVPR|GS (thrombin, SEQ ID NO: 206), ENLYFQG (TEV, SEQ ID NO: 207), LEVLFQ|GP (PreScission, SEQ ID NO: 208), IEGR| or IDGR|(Factor Xa, SEQ ID NO: 209 or 210), DDDDK| (Enterokinase, SEQ ID NO: 211) and AHREQIGG| (SUMO protease, SEQ ID NO: 212). “|” indicates where cleavage occurs.

[0409] The modified BoNT polypeptides of the present disclosure (e.g., without limitation, polypeptides comprising amino acid sequence of any of SEQ ID NOs: 2-34, 36-43, 45-77, 79-86, 88-120, 122-129, 131-203, 213-216), will generally be produced by expression form recombinant nucleic acids in appropriate cells (e.g., E. coli, or insect cells) and isolated. The nucleic acids encoding the polypeptides described herein may be obtained, and the nucleotide sequence of the nucleic acids determined, by any method known in the art.

[0410] Further provided herein are isolated and/or recombinant nucleic acids encoding any of the modified BoNT polypeptides disclosed herein. The nucleic acids encoding the isolated polypeptide fragments of the present disclosure, may be DNA or RNA, double-stranded or single stranded. In certain aspects, the subject nucleic acids encoding the isolated polypeptide fragments are further understood to include nucleic acids encoding polypeptides that are variants of any of the modified BoNT polypeptides described herein.

[0411] Variant nucleotide sequences include sequences that differ by one or more nucleotide substitutions, additions or deletions, such as allelic variants. In some embodiments, the isolated nucleic acid molecule of the present disclosure comprising a polynucleotide encoding a polypeptide comprising an amino acid sequence that has at least 85%, at least 86%, at least 87%, at least 88%, at least 89%, at least 90%, at least 91%, at least 92%, at least 93%, at least 94%, at least 95%, at least 96%, at least 97%, at least 98%, at least 99%, or at least 99.5% identity of any of SEQ ID NOs: 2-34, 36-43, 45-77, 79-86, 88-120, 122-129, 131-203, 213-215. In some embodiments, the isolated nucleic acid molecule of the present disclosure comprising a polynucleotide encoding a polypeptide comprising an amino acid sequence that has 85%, 86%, 87%, 88%, 89%, 90%, 91%, 92%, 93%, 94%, 95%, 96%, 97%, 98%, 99%, or 100% identity of any of SEQ ID NOs: 2-34, 36-43, 45-77, 79-86, 88-120, 122-129, 131-203, 213-215.

[0412] In some embodiments, the nucleic acid is comprised within a vector, such as an expression vector. In some embodiments, the vector comprises a promoter operably linked to the nucleic acid.

[0413] A variety of promoters can be used for expression of the polypeptides described herein, including, but not limited to, cytomegalovirus (CMV) intermediate early promoter, a viral LTR such as the Rous sarcoma virus LTR, HIV-LTR, HTLV-1 LTR, the simian virus 40 (SV40) early promoter, E. coli lac UV5 promoter, and the herpes simplex tk virus promoter. Regulatable promoters can also be used. Such regulatable promoters include those using the lac repressor from E. coli as a transcription modulator to regulate transcription from lac operator-bearing mammalian cell promoters [Brown, M. et al., Cell, 49:603-612 (1987)], those using the tetracycline repressor (tetR) [Gossen, M., and Bujard, H., Proc. Natl. Acad. Sci. USA 89:5547-5551 (1992); Yao, F. et al., Human Gene Therapy, 9:1939-1950 (1998); Shockelt, P., et al., Proc. Natl. Acad. Sci. USA, 92:6522-6526 (1995)].

[0414] Other systems include FK506 dimer, VP16 or p65 using astradiol, RU486, diphenol murislerone, or rapamycin. Inducible systems are available from Invitrogen, Clontech and Ariad. Regulatable promoters that include a repressor with the operon can be used. In one embodiment, the lac repressor from Escherichia coli can function as a transcriptional modulator to regulate transcription from lac operator-bearing mammalian cell promoters [M. Brown et al., Cell, 49:603-612 (1987)]; Gossen and Bujard (1992); [M. Gossen et al., Natl. Acad. Sci. USA, 89:5547-5551 (1992)] combined the tetracycline repressor (tetR) with the transcription activator (VP 16) to create a tetR-mammalian cell transcription activator fusion protein, tTa (tetR-VP 16), with the tetO-bearing minimal promoter derived from the human cytomegalovirus (hCMV) major immediate-early promoter to create a tetR-tet operator system to control gene expression in mammalian cells. In one embodiment, a tetracycline inducible switch is used (Yao et al., Human Gene Therapy; Gossen et al., Natl. Acad. Sci. USA, 89:5547-5551 (1992); Shockett et al., Proc. Natl. Acad. Sci. USA, 92:6522-6526 (1995)).

[0415] Additionally, the vector can contain, for example, some or all of the following: a selectable marker gene, such as the neomycin gene for selection of stable or transient transfectants in mammalian cells; enhancer/promoter sequences from the immediate early gene of human CMV for high levels of transcription; transcription termination and RNA processing signals from SV40 for mRNA stability; SV40 polyoma origins of replication and ColE1 for proper episomal replication; internal ribosome binding sites (IRESes), versatile multiple cloning sites; and T7 and SP6 RNA promoters for in vitro transcription of sense and antisense RNA. Suitable vectors and methods for producing vectors containing transgenes are well known and available in the art.

[0416] An expression vector comprising the nucleic acid can be transferred to a host cell by conventional techniques (e.g., electroporation, liposomal transfection, and calcium phosphate precipitation) and the transfected cells are then cultured by conventional techniques to produce the polypeptides described herein. In some embodiments, the expression of the polypeptides described herein is regulated by a constitutive, an inducible or a tissue-specific promoter.

[0417] The host cells used to express the isolated polypeptides described herein may be either bacterial cells such as Escherichia coli, or, preferably, eukaryotic cells. In particular, mammalian cells, such as Chinese hamster ovary cells (CHO), in conjunction with a vector such as the major intermediate early gene promoter element from human cytomegalovirus is an effective expression system for immunoglobulins (Foecking et al. (1986) “Powerful And Versatile Enhancer-Promoter Unit For Mammalian Expression Vectors,” Gene 45:101-106; Cockett et al. (1990) “High Level Expression Of Tissue Inhibitor Of Metalloproteinases In Chinese Hamster Ovary Cells Using Glutamine Synthetase Gene Amplification,” Biotechnology 8:662-667). A variety of host-expression vector systems may be utilized to express the isolated polypeptides described herein. Such host-expression systems represent vehicles by which the coding sequences of the isolate d polypeptides described herein may be produced and subsequently purified, but also represent cells which may, when transformed or transfected with the appropriate nucleotide coding sequences, express the isolated polypeptides described herein in situ. These include, but are not limited to, microorganisms such as bacteria (e.g., E. coli and B. subtilis) transformed with recombinant bacteriophage DNA, plasmid DNA or cosmid DNA expression vectors containing coding sequences for the isolated polypeptides described herein; yeast (e.g., Saccharomyces pichia) transformed with recombinant yeast expression vectors containing sequences encoding the isolated polypeptides described herein; insect cell systems infected with recombinant virus expression vectors (e.g., baclovirus) containing the sequences encoding the isolated polypeptides described herein; plant cell systems infected with recombinant virus expression vectors (e.g., cauliflower mosaic virus (CaMV) and tobacco mosaic virus (TMV) or transformed with recombinant plasmid expression vectors (e.g., Ti plasmid) containing sequences encoding the isolated polypeptides described herein; or mammalian cell systems (e.g., COS, CHO, BHK, 293, 293T, 3T3 cells, lymphotic cells (see U.S. Pat. No. 5,807,715), Per C.6 cells (human retinal cells developed by Crucell) harboring recombinant expression constructs containing promoters derived from the genome of mammalian cells (e.g., metallothionein promoter) or from mammalian viruses (e.g., the adenovirus late promoter; the vaccinia virus 7.5K promoter).

[0418] In bacterial systems, a number of expression vectors may be advantageously selected depending upon the use intended for the polypeptides being expressed. For example, when a large quantity of such a protein is to be produced, for the generation of pharmaceutical compositions of polypeptides described herein, vectors which direct the expression of high levels of fusion protein products that are readily purified may be desirable. Such vectors include, but are not limited, to the E. coli expression vector pUR278 (Rather et al. (1983) “Easy Identification Of cDNA Clones,” EMBO J. 2:1791-1794), in which the coding sequence may be ligated individually into the vector in frame with the lac Z coding region so that a fusion protein is produced; pIN vectors (Inouye et al. (1985) “Up-Promoter Mutations In The 1pp Gene Of Escherichia Coli,” Nucleic Acids Res. 13:3101-3110; Van Heeke et al. (1989) “Expression Of Human Asparagine Synthetase In Escherichia Coli,” J. Biol. Chem. 24:5503-5509); and the like. pGEX vectors may also be used to express foreign polypeptides as fusion proteins with glutathione S-transferase (GST). In general, such fusion proteins are soluble and can easily be purified from lysed cells by adsorption and binding to a matrix glutathione-agarose beads followed by elution in the presence of free glutathione.

[0419] The pGEX vectors are designed to include thrombin or factor Xa protease cleavage sites so that the cloned target gene product can be released from the GST moiety. In an insect system, Autographa californica nuclear polyhedrosis virus (AcNPV) is used as a vector to express foreign genes. The virus grows in Spodoptera frugiperda cells. The coding sequence may be cloned individually into non-essential regions (e.g., the polyhedrin gene) of the virus and placed under control of an AcNPV promoter (e.g., the polyhedrin promoter).

[0420] In mammalian host cells, a number of viral-based expression systems may be utilized. In cases where an adenovirus is used as an expression vector, the coding sequence of interest may be ligated to an adenovirus transcription/translation control complex, e.g., the late promoter and tripartite leader sequence. This chimeric gene may then be inserted in the adenovirus genome by in vitro or in vivo recombination. Insertion in a non-essential region of the viral genome (e.g., region E1 or E3) will result in a recombinant virus that is viable and capable of expressing the immunoglobulin molecule in infected hosts (e.g., see Logan et al. (1984) “Adenovirus Tripartite Leader Sequence Enhances Translation Of mRNAs Late After Infection,” Proc. Natl. Acad. Sci. USA 81:3655-3659). Specific initiation signals may also be required for efficient translation of inserted antibody coding sequences. These signals include the ATG initiation codon and adjacent sequences. Furthermore, the initiation codon must be in phase with the reading frame of the desired coding sequence to ensure translation of the entire insert. These exogenous translational control signals and initiation codons can be of a variety of origins, both natural and synthetic.

[0421] The efficiency of expression may be enhanced by the inclusion of appropriate transcription enhancer elements, transcription terminators, etc. (see Bitter et al. (1987) “Expression And Secretion Vectors For Yeast,” Methods in Enzymol. 153:516-544). In addition, a host cell strain may be chosen which modulates the expression of the inserted sequences, or modifies and processes the gene product in the specific fashion desired. Such modifications (e.g., glycosylation) and processing (e.g., cleavage) of protein products may be important for the function of the protein. For example, in certain embodiments, the polypeptides described herein may be expressed as a single gene product (e.g., as a single polypeptide chain, i.e., as a polyprotein precursor), requiring proteolytic cleavage by native or recombinant cellular mechanisms to form separate polypeptides described herein.

[0422] The disclosure thus encompasses engineering a nucleic acid sequence to encode a polyprotein precursor molecule comprising the polypeptides described herein, which includes coding sequences capable of directing post translational cleavage of said polyprotein precursor. Post-translational cleavage of the polyprotein precursor results in the polypeptides described herein. The post translational cleavage of the precursor molecule comprising the polypeptides described herein may occur in vivo (i.e., within the host cell by native or recombinant cell systems/mechanisms, e.g. furin cleavage at an appropriate site) or may occur in vitro (e.g. incubation of said polypeptide chain in a composition comprising proteases or peptidases of known activity and/or in a composition comprising conditions or reagents known to foster the desired proteolytic action).

[0423] Purification and modification of recombinant proteins is well known in the art such that the design of the polyprotein precursor could include a number of embodiments readily appreciated by a skilled worker. Any known proteases or peptidases known in the art can be used for the described modification of the precursor molecule, e.g., thrombin or factor Xa (Nagai et al. (1985) “Oxygen Binding Properties Of Human Mutant Hemoglobins Synthesized In Escherichia Coli,” Proc. Nat. Acad. Sci. USA 82:7252-7255, and reviewed in Jenny et al. (2003) “A Critical Review Of The Methods For Cleavage Of Fusion Proteins With Thrombin And Factor Xa,” Protein Expr. Purif. 31:1-11, each of which is incorporated by reference herein in its entirety)), enterokinase (Collins-Racie et al. (1995) “Production Of Recombinant Bovine Enterokinase Catalytic Subunit In Escherichia Coli Using The Novel Secretory Fusion Partner DsbA,” Biotechnology 13:982-987 hereby incorporated by reference herein in its entirety)), furin, and AcTEV (Parks et al. (1994) “Release Of Proteins And Peptides From Fusion Proteins Using A Recombinant Plant Virus Proteinase,” Anal. Biochem. 216:413-417 hereby incorporated by reference herein in its entirety)) and the Foot and Mouth Disease Virus Protease C3.

[0424] Different host cells have characteristic and specific mechanisms for the post-translational processing and modification of proteins and gene products. Appropriate cell lines or host systems can be chosen to ensure the correct modification and processing of the foreign protein expressed. To this end, eukaryotic host cells which possess the cellular machinery for proper processing of the primary transcript, glycosylation, and phosphorylation of the gene product may be used. Such mammalian host cells include but are not limited to CHO, VERY, BHK, HeLa, COS, MDCK, 293, 293T, 3T3, WI38, BT483, Hs578T, HTB2, BT20 and T47D, CRL7030 and Hs578Bst.

[0425] For long-term, high-yield production of recombinant proteins, stable expression is preferred. For example, cell lines which stably express polypeptides described herein may be engineered. Rather than using expression vectors which contain viral origins of replication, host cells can be transformed with DNA controlled by appropriate expression control elements (e.g., promoter, enhancer, sequences, transcription terminators, polyadenylation sites, etc.), and a selectable marker. Following the introduction of the foreign DNA, engineered cells may be allowed to grow for 1-2 days in an enriched media, and then are switched to a selective media. The selectable marker in the recombinant plasmid confers resistance to the selection and allows cells to stably integrate the plasmid into their chromosomes and grow to form foci which in turn can be cloned and expanded into cell lines. This method may advantageously be used to engineer cell lines which express the polypeptides described herein. Such engineered cell lines may be particularly useful in screening and evaluation of polypeptides that interact directly or indirectly with the polypeptides described herein.

[0426] A number of selection systems may be used, including but not limited to the herpes simplex virus thymidine kinase (Wigler et al. (1977) “Transfer Of Purified Herpes Virus Thymidine Kinase Gene To Cultured Mouse Cells,” Cell 11: 223-232), hypoxanthine-guanine phosphoribosyltransferase (Szybalska et al. (1992) “Use Of The HPRT Gene And The HAT Selection Technique In DNA-Mediated Transformation Of Mammalian Cells First Steps Toward Developing Hybridoma Techniques And Gene Therapy,” Bioessays 14: 495-500), and adenine phosphoribosyltransferase (Lowy et al. (1980) “Isolation Of Transforming DNA: Cloning The Hamster aprt Gene,” Cell 22: 817-823) genes can be employed in tk-, hgprt- or aprt-cells, respectively. Also, antimetabolite resistance can be used as the basis of selection for the following genes: dhfr, which confers resistance to methotrexate (Wigler et al. (1980) “Transformation Of Mammalian Cells With An Amplifiable Dominant-Acting Gene,” Proc. Natl. Acad. Sci. USA 77:3567-3570; O'Hare et al. (1981) “Transformation Of Mouse Fibroblasts To Methotrexate Resistance By A Recombinant Plasmid Expressing A Prokaryotic Dihydrofolate Reductase,” Proc. Natl. Acad. Sci. USA 78: 1527-1531); gpt, which confers resistance to mycophenolic acid (Mulligan et al. (1981) “Selection For Animal Cells That Express The Escherichia coli Gene Coding For Xanthine-Guanine Phosphoribosyltransferase,” Proc. Natl. Acad. Sci. USA 78: 2072-2076); neo, which confers resistance to the aminoglycoside G-418 (Tolstoshev (1993) “Gene Therapy, Concepts, Current Trials And Future Directions,” Ann. Rev. Pharmacol. Toxicol. 32:573-596; Mulligan (1993) “The Basic Science Of Gene Therapy,” Science 260:926-932; and Morgan et al. (1993) “Human Gene Therapy,” Ann. Rev. Biochem. 62:191-217) and hygro, which confers resistance to hygromycin (Santerre et al. (1984) “Expression Of Prokaryotic Genes For Hygromycin B And G418 Resistance As Dominant-Selection Markers In Mouse L Cells,” Gene 30:147-156). Methods commonly known in the art of recombinant DNA technology which can be used are described in Ausubel et al. (eds.), 1993, Current Protocols in Molecular Biology, John Wiley & Sons, NY; Kriegler, 1990, Gene Transfer and Expression, A Laboratory Manual, Stockton Press, NY; and in Chapters 12 and 13, Dracopoli et al. (eds), 1994, Current Protocols in Human Genetics, John Wiley & Sons, NY.; Colberre-Garapin et al. (1981) “A New Dominant Hybrid Selective Marker For Higher Eukaryotic Cells,” J. Mol. Biol. 150:1-14.

[0427] The expression levels of polypeptides described herein can be increased by vector amplification (for a review, see Bebbington and Hentschel, The use of vectors based on gene amplification for the expression of cloned genes in mammalian cells in DNA cloning, Vol. 3 (Academic Press, New York, 1987). When a marker in the vector system expressing a polypeptide described herein is amplifiable, increase in the level of inhibitor present in culture of host cell will increase the number of copies of the marker gene. Since the amplified region is associated with the nucleotide sequence of a polypeptide described herein or a polypeptide described herein, production of the polypeptide will also increase (Crouse et al. (1983) “Expression And Amplification Of Engineered Mouse Dihydrofolate Reductase Minigenes,” Mol. Cell. Biol. 3:257-266).

[0428] Once a polypeptide described herein has been recombinantly expressed, it may be purified by any method known in the art for purification of polypeptides, polyproteins or antibodies (e.g., analogous to antibody purification schemes based on antigen selectivity) for example, by chromatography (e.g., ion exchange, affinity, particularly by affinity for the specific antigen (in some embodiments after Protein A selection where the polypeptide comprises an Fc domain (or portion thereof)), and sizing column chromatography), centrifugation, differential solubility, or by any other standard technique for the purification of polypeptides or antibodies. Other aspects of the present disclosure relate to a cell comprising a nucleic acid described herein or a vector described herein.

[0429] The cell may be a prokaryotic or eukaryotic cell. In some embodiments, the cell in a mammalian cell. Exemplary cell types are described herein. Other aspects of the present disclosure related to a cell expressing the modified BoNT polypeptides described herein. The cell may be a prokaryotic or eukaryotic cell. In some embodiments, the cell in a mammalian cell. Exemplary cell types are described herein. The cell can be for propagation of the nucleic acid or for expression of the nucleic acid, or both. Such cells include, without limitation, prokaryotic cells including, without limitation, strains of aerobic, microaerophilic, capnophilic, facultative, anaerobic, gram-negative and gram-positive bacterial cells such as those derived from, e.g., Escherichia coli, Bacillus subtilis, Bacillus licheniformis, Bacteroides fragilis, Clostridia perfringens, Clostridia difficile, Caulobacter crescentus, Lactococcus lactis, Methylobacterium extorquens, Neisseria meningirulls, Neisseria meningitidis, Pseudomonas fluorescens and Salmonella typhimurium; and eukaryotic cells including, without limitation, yeast strains, such as, e.g., those derived from Pichia pastoris, Pichia methanolica, Pichia angusta, Schizosaccharomyces pombe, Saccharomyces cerevisiae and Yarrowia lipolytica; insect cells and cell lines derived from insects, such as, e.g., those derived from Spodoptera frugiperda, Trichoplusia ni, Drosophila melanogaster and Manduca sexta; and mammalian cells and cell lines derived from mammalian cells, such as, e.g., those derived from mouse, rat, hamster, porcine, bovine, equine, primate and human. Cell lines may be obtained from the American Type Culture Collection, European Collection of Cell Cultures and the German Collection of Microorganisms and Cell Cultures. Non-limiting examples of specific protocols for selecting, making and using an appropriate cell line are described in e.g., INSECT CELL CULTURE ENGINEERING (Mattheus F. A. Goosen et al. eds., Marcel Dekker, 1993); INSECT CELL CULTURES: FUNDAMENTAL AND APPLIED ASPECTS (J. M. Vlak et al. eds., Kluwer Academic Publishers, 1996); Maureen A. Harrison & Ian F. Rae, GENERAL TECHNIQUES OF CELL CULTURE (Cambridge University Press, 1997); CELL AND TISSUE CULTURE: LABORATORY PROCEDURES (Alan Doyle et al eds., John Wiley and Sons, 1998); R. Ian Freshney, CULTURE OF ANIMAL CELLS: A MANUAL OF BASIC TECHNIQUE (Wiley-Liss, 4.sup.th ed. 2000); ANIMAL CELL CULTURE: A PRACTICAL APPROACH (John R. W. Masters ed., Oxford University Press, 3.sup.rd ed. 2000); MOLECULAR CLONING A LABORATORY MANUAL, supra, (2001); BASIC CELL CULTURE: A PRACTICAL APPROACH (John M. Davis, Oxford Press, 2.sup.nd ed. 2002); and CURRENT PROTOCOLS IN MOLECULAR BIOLOGY, supra, (2004).

[0430] These protocols are routine procedures within the scope of one skilled in the art and from the teaching herein. Yet other aspects of the present disclosure relate to a method of producing a polypeptide described herein, the method comprising obtaining a cell described herein and expressing nucleic acid described herein in said cell. In some embodiments, the method further comprises isolating and purifying a polypeptide described herein.

[0431] In some embodiments, botulinum neurotoxin can be obtained by establishing and growing cultures of Clostridium botulinum in a fermenter and then harvesting and purifying the fermented mixture in accordance with known procedures. All the botulinum toxin serotypes are initially synthesized as inactive single chain proteins which must be cleaved or nicked by proteases to become neuroactive.

[0432] The bacterial strains that make botulinum toxin serotypes A and G possess endogenous proteases and serotypes A and G can therefore be recovered from bacterial cultures in predominantly their active form. In contrast, botulinum toxin serotypes Ci, D and E are synthesized by non-proteolytic strains and are therefore typically unactivated when recovered from culture. Serotypes B and F are produced by both proteolytic and non-proteolytic strains and therefore can be recovered in either the active or inactive form. The proteolytic strains that produce, for example, the botulinum toxin type A serotype may only cleave a portion of the toxin produced.

[0433] The exact proportion of nicked to un-nicked molecules depends on the length of incubation and the temperature of the culture. Therefore, a certain percentage of a preparation of, for example, the botulinum toxin type A toxin may be inactive. In one embodiment, the neurotoxin of the present disclosure is in an active state. In one embodiment, the neurotoxin is in an inactive state. In one embodiment, a combination of active and inactive neurotoxin is envisioned.

[0434] Thus, the present disclosure also contemplates pharmaceutically compositions comprising the modified BoNTs or the chimeric molecules of the present disclosure. As it may also become clear later in the present disclosure, the pharmaceutical composition of the present disclosure, may further comprise other therapeutic agents suitable for the specific disease such composition is designed to treat. In some embodiments, the pharmaceutically composition of the present disclosure further comprises pharmaceutically-acceptable carriers.

[0435] The term “pharmaceutically-acceptable carrier”, as used herein, means a pharmaceutically-acceptable material, composition or vehicle, such as a liquid or solid filler, diluent, excipient, manufacturing aid (e.g., lubricant, talc magnesium, calcium or zinc stearate, or steric acid), or solvent encapsulating material, involved in carrying or transporting the polypeptide from one site (e.g., the delivery site) of the body, to another site (e.g., organ, tissue or portion of the body).

[0436] A pharmaceutically acceptable carrier is “acceptable” in the sense of being compatible with the other ingredients of the formulation and not injurious to the tissue of the subject (e.g., physiologically compatible, sterile, physiologic pH, etc.). Some examples of materials which can serve as pharmaceutically-acceptable carriers include: (1) sugars, such as lactose, glucose and sucrose; (2) starches, such as corn starch and potato starch; (3) cellulose, and its derivatives, such as sodium carboxymethylcellulose, methylcellulose, ethyl cellulose, microcrystalline cellulose and cellulose acetate; (4) powdered tragacanth; (5) malt; (6) gelatin; (7) lubricating agents, such as magnesium stearate, sodium lauryl sulfate and talc; (8) excipients, such as cocoa butter and suppository waxes; (9) oils, such as peanut oil, cottonseed oil, safflower oil, sesame oil, olive oil, corn oil and soybean oil; (10) glycols, such as propylene glycol; (11) polyols, such as glycerin, sorbitol, mannitol and polyethylene glycol (PEG); (12) esters, such as ethyl oleate and ethyl laurate; (13) agar; (14) buffering agents, such as magnesium hydroxide and aluminum hydroxide; (15) alginic acid; (16) pyrogen-free water; (17) isotonic saline; (18) Ringer's solution; (19) ethyl alcohol; (20) pH buffered solutions; (21) polyesters, polycarbonates and/or polyanhydrides; (22) bulking agents, such as polypeptides and amino acids (23) serum component, such as serum albumin, HDL and LDL; (22) C2-C12 alcohols, such as ethanol; and (23) other non-toxic compatible substances employed in pharmaceutical formulations. Wetting agents, coloring agents, release agents, coating agents, sweetening agents, flavoring agents, perfuming agents, preservative and antioxidants can also be present in the formulation. The terms such as “excipient”, “carrier”, “pharmaceutically acceptable carrier” or the like are used interchangeably herein. In some embodiments, a modified BoNT polypeptide of the present disclosure in a composition is administered by injection, by means of a catheter, by means of a suppository, or by means of an implant, the implant being of a porous, non-porous, or gelatinous material, including a membrane, such as a sialastic membrane, or a fiber.

[0437] Typically, when administering the composition, materials to which the polypeptide of the disclosure does not absorb are used. In other embodiments, the modified BoNT polypeptides of the present disclosure are delivered in a controlled release system. Such compositions and methods for administration are provides in U.S. Patent publication No. 2007/0020295, the contents of which are herein incorporated by reference. In one embodiment, a pump may be used (see, e.g., Langer, 1990, Science 249:1527-1533; Sefton, 1989, CRC Crit. Ref. Biomed. Eng. 14:201; Buchwald et al., 1980, Surgery 88:507; Saudek et al., 1989, N. Engl. J. Med. 321:574). In another embodiment, polymeric materials can be used. (See, e.g., Medical Applications of Controlled Release (Langer and Wise eds., CRC Press, Boca Raton, Fla., 1974); Controlled Drug Bioavailability, Drug Product Design and Performance (Smolen and Ball eds., Wiley, New York, 1984); Ranger and Peppas, 1983, Macromol. Sci. Rev. Macromol. Chem. 23:61. See also Levy et al., 1985, Science 228:190; During et al., 1989, Ann. Neurol. 25:351; Howard et al., 1989, J. Neurosurg. 71:105.) Other controlled release systems are discussed, for example, in Langer, supra.

[0438] The modified BoNT polypeptides of the present disclosure can be administered as pharmaceutical compositions comprising a therapeutically effective amount of a binding agent and one or more pharmaceutically compatible ingredients. In typical embodiments, the pharmaceutical composition is formulated in accordance with routine procedures as a pharmaceutical composition adapted for intravenous or subcutaneous administration to a subject, e.g., a human being.

[0439] Typically, compositions for administration by injection are solutions in sterile isotonic aqueous buffer. Where necessary, the pharmaceutical can also include a solubilizing agent and a local anesthetic such as lignocaine to ease pain at the site of the injection. Generally, the ingredients are supplied either separately or mixed together in unit dosage form, for example, as a dry lyophilized powder or water free concentrate in a hermetically sealed container such as an ampoule or sachette indicating the quantity of active agent. Where the pharmaceutical is to be administered by infusion, it can be dispensed with an infusion bottle containing sterile pharmaceutical grade water or saline. Where the pharmaceutical is administered by injection, an ampoule of sterile water for injection or saline can be provided so that the ingredients can be mixed prior to administration. A pharmaceutical composition for systemic administration may be a liquid, e.g., sterile saline, lactated Ringer's or Hank's solution. In addition, the pharmaceutical composition can be in solid forms and re-dissolved or suspended immediately prior to use. Lyophilized forms are also contemplated. The pharmaceutical composition can be contained within a lipid particle or vesicle, such as a liposome or microcrystal, which is also suitable for parenteral administration. The particles can be of any suitable structure, such as unilamellar or plurilamellar, so long as compositions are contained therein.

[0440] The polypeptides of the present disclosure can be entrapped in ‘stabilized plasmid-lipid particles’ (SPLP) containing the fusogenic lipid dioleoylphosphatidylethanolamine (DOPE), low levels (5-10 mol %) of cationic lipid, and stabilized by a polyethyleneglycol (PEG) coating (Zhang Y. P. et al., Gene Ther. 1999, 6:1438-47). Positively charged lipids such as N-[1-(2,3-dioleoyloxi)propyl]-N,N,N-trimethyl-amoniummethylsulfate, or “DOTAP,” are particularly preferred for such particles and vesicles. The preparation of such lipid particles is well known. See, e.g., U.S. Pat. Nos. 4,880,635; 4,906,477; 4,911,928; 4,917,951; 4,920,016; and 4,921,757. The pharmaceutical compositions of the present disclosure may be administered or packaged as a unit dose, for example.

[0441] The term “unit dose” when used in reference to a pharmaceutical composition of the present disclosure refers to physically discrete units suitable as unitary dosage for the subject, each unit containing a predetermined quantity of active material calculated to produce the desired therapeutic effect in association with the required diluent; i.e., carrier, or vehicle. In some embodiments, the modified BoNT polypeptides described herein may be conjugated to a therapeutic moiety, e.g., an antibiotic. Techniques for conjugating such therapeutic moieties to polypeptides, including e.g., Fc domains, are well known; see, e.g., Amon et al., “Monoclonal Antibodies For Immunotargeting Of Drugs In Cancer Therapy”, in Monoclonal Antibodies And Cancer Therapy, Reisfeld et al. (eds.), 1985, pp. 243-56, Alan R. Liss, Inc.); Hellstrom et al., “Antibodies For Drug Delivery”, in Controlled Drug Delivery (2nd Ed.), Robinson et al. (eds.), 1987, pp. 623-53, Marcel Dekker, Inc.); Thorpe, “Antibody Carriers Of Cytotoxic Agents In Cancer Therapy: A Review”, in Monoclonal Antibodies '84: Biological And Clinical Applications, Pinchera et al. (eds.), 1985, pp. 475-506); “Analysis, Results, And Future Prospective Of The Therapeutic Use Of Radiolabeled Antibody In Cancer Therapy”, in Monoclonal Antibodies For Cancer Detection And Therapy, Baldwin et al. (eds.), 1985, pp. 303-16, Academic Press; and Thorpe et al. (1982) “The Preparation And Cytotoxic Properties Of Antibody-Toxin Conjugates,” Immunol. Rev., 62:119-158. Further, the pharmaceutical composition can be provided as a pharmaceutical kit comprising (a) a container containing a polypeptide of the disclosure in lyophilized form and (b) a second container containing a pharmaceutically acceptable diluent (e.g., sterile water) for injection. The pharmaceutically acceptable diluent can be used for reconstitution or dilution of the lyophilized polypeptide of the disclosure. Optionally associated with such container(s) can be a notice in the form prescribed by a governmental agency regulating the manufacture, use or sale of pharmaceuticals or biological products, which notice reflects approval by the agency of manufacture, use or sale for human administration. In another aspect, an article of manufacture containing materials useful for the treatment of the diseases described above is included. In some embodiments, the article of manufacture comprises a container and a label.

[0442] Suitable containers include, for example, bottles, vials, syringes, and test tubes. The containers may be formed from a variety of materials such as glass or plastic. In some embodiments, the container holds a composition that is effective for treating a disease described herein and may have a sterile access port. For example, the container may be an intravenous solution bag or a vial having a stopper pierceable by a hypodermic injection needle. The active agent in the composition is an isolated polypeptide of the disclosure. In some embodiments, the label on or associated with the container indicates that the composition is used for treating the disease of choice. The article of manufacture may further comprise a second container comprising a pharmaceutically-acceptable buffer, such as phosphate-buffered saline, Ringer's solution, or dextrose solution. It may further include other materials desirable from a commercial and user standpoint, including other buffers, diluents, filters, needles, syringes, and package inserts with instructions for use.

[0443] The modified BoNT polypeptides, the chimeric molecules, and the pharmaceutical compositions of the present disclosure may be used for the treatment of conditions associated with unwanted neuronal activities. Thus, further provided herein are methods of treating a condition associated with unwanted neuronal activity, the method comprising administering a therapeutically effective amount of the modified BoNT polypeptide, the chimeric molecule, or the pharmaceutical composition described herein to thereby treat the condition. In some embodiments, the modified BoNT polypeptides, the chimeric molecules, and the pharmaceutic compositions of the present disclosure contact one or more neuron(s) exhibiting unwanted neuronal activity,

[0444] Condition typically treated with a neurotoxin (e.g., skeletal muscle conditions, smooth muscle conditions, glandular conditions, a neuromuscular disorder, an autonomic disorder, pain, or an aesthetic/cosmetic condition) are associated with unwanted neuronal activity, as determined by the skilled practitioner. Administration is by a route that contacts an effective amount of the composition to neurons exhibiting the unwanted activity. In some embodiments, the condition may be associated with overactive neurons or glands. Specific conditions envisioned for treatment by the methods discussed herein include, without limitation, spasmodic dysphonia, spasmodic torticollis, laryngeal dystonia, oromandibular dysphonia, lingual dystonia, cervical dystonia, focal hand dystonia, blepharospasm, strabismus, hemifacial spasm, eyelid disorder, cerebral palsy, focal spasticity and other voice disorders, spasmodic colitis, neurogenic bladder, anismus, limb spasticity, tics, tremors, bruxism, anal fissure, achalasia, dysphagia and other muscle tone disorders and other disorders characterized by involuntary movements of muscle groups, lacrimation, hyperhydrosis, excessive salivation, excessive gastrointestinal secretions as well as other secretory disorders, pain from muscle spasms, headache pain. In addition, the present disclosure can be used to treat dermato logical or aesthetic/cosmetic conditions, for example, reduction of brow furrows, reduction of skin wrinkles.

[0445] The present disclosure can also be used in the treatment of sports injuries. Borodic U.S. Pat. No. 5,053,005 discloses methods for treating juvenile spinal curvature, i.e. scoliosis, using botulinum type A. The disclosure of Borodic is incorporated in its entirety herein by reference. In one embodiment, using substantially similar methods as disclosed by Borodic, a modified neurotoxin can be administered to a mammal, preferably a human, to treat spinal curvature. In a suitable embodiment, a modified neurotoxin comprising botulinum type E fused with a leucine-based motif is administered. Even more preferably, a modified neurotoxin comprising botulinum type A-E with a leucine-based motif fused to the carboxyl terminal of its light chain is administered to the mammal, preferably a human, to treat spinal curvature.

[0446] In addition, the modified neurotoxin can be administered to treat other neuromuscular disorders using well known techniques that are commonly performed with botulinum type A. For example, the present disclosure can be used to treat pain, for example, headache pain, pain from muscle spasms and various forms of inflammatory pain. For example, Aoki U.S. Pat. No. 5,721,215 and Aoki U.S. Pat. No. 6,113,915 disclose methods of using botulinum toxin type A for treating pain. The disclosure of these two patents is incorporated in its entirety herein by reference.

[0447] Autonomic nervous system disorders can also be treated with a modified neurotoxin. For example, glandular malfunctioning is an autonomic nervous system disorder. Glandular malfunctioning includes excessive sweating and excessive salivation. Respiratory malfunctioning is another example of an autonomic nervous system disorder. Respiratory malfunctioning includes chronic obstructive pulmonary disease and asthma. Sanders et al. disclose methods for treating the autonomic nervous system; for example, treating autonomic nervous system disorders such as excessive sweating, excessive salivation, asthma, etc., using naturally existing botulinum toxins. The disclosure of Sander et al. is incorporated in its entirety by reference herein.

[0448] In one embodiment, substantially similar methods to that of Sanders et al. can be employed, but using a modified neurotoxin, to treat autonomic nervous system disorders such as the ones discussed above. For example, a modified neurotoxin can be locally applied to the nasal cavity of the mammal in an amount sufficient to degenerate cholinergic neurons of the autonomic nervous system that control the mucous secretion in the nasal cavity. Pain that can be treated by a modified neurotoxin includes pain caused by muscle tension, or spasm, or pain that is not associated with muscle spasm. For example, Binder in U.S. Pat. No. 5,714,468 discloses that headache caused by vascular disturbances, muscular tension, neuralgia and neuropathy can be treated with a naturally occurring botulinum toxin, for example Botulinum type A. The disclosures of Binder are incorporated in its entirety herein by reference.

[0449] In one embodiment, substantially similar methods to that of Binder can be employed, but using a modified neurotoxin, to treat headache, especially the ones caused by vascular disturbances, muscular tension, neuralgia and neuropathy. Pain caused by muscle spasm can also be treated by an administration of a modified neurotoxin. For example, a botulinum type E fused with a leucine-based motif, preferably at the carboxyl terminal of the botulinum type E light chain, can be administered intramuscularly at the pain/spasm location to alleviate pain. Furthermore, a modified neurotoxin can be administered to a mammal to treat pain that is not associated with a muscular disorder, such as spasm.

[0450] In one broad embodiment, methods of the present disclosure to treat non-spasm related pain include central administration or peripheral administration of the modified neurotoxin. For example, Foster et al. in U.S. Pat. No. 5,989,545 discloses that a botulinum toxin conjugated with a targeting moiety can be administered centrally (intrathecally) to alleviate pain. The disclosures of Foster et al. are incorporated in its entirety by reference herein.

[0451] In one embodiment, substantially similar methods to that of Foster et al. can be employed, but using the compositions described herein to treat pain. The pain to be treated can be an acute pain or chronic pain. An acute or chronic pain that is not associated with a muscle spasm can also be alleviated with a local, peripheral administration of the modified neurotoxin to an actual or a perceived pain location on the mammal.

[0452] In one embodiment, the modified neurotoxin is administered subcutaneously at or near the location of pain, for example, at or near a cut. In some embodiments, the modified neurotoxin is administered intramuscularly at or near the location of pain, for example, at or near a bruise location on the mammal. In some embodiments, the modified BoNT polypeptide is injected directly into a joint of a mammal, for treating or alleviating pain caused by arthritic conditions. Also, frequent repeated injection or infusion of the modified neurotoxin to a peripheral pain location is within the scope of the present disclosure. Routes of administration for such methods are known in the art and easily adapted to the methods described herein by the skilled practitioner (e.g., see for example, Harrison's Principles of Internal Medicine (1998), edited by Anthony Fauci et al., 14.sup.th edition, published by McGraw Hill).

[0453] By way of non-limiting example, the treatment of a neuromuscular disorder can comprise a step of locally administering an effective amount of the molecule to a muscle or a group of muscles, the treatment of an autonomic disorder can comprise a step of locally administering an effective of the molecule to a gland or glands, and the treatment of pain can comprise a step of administering an effective amount of the molecule the site of the pain. In addition, the treatment of pain can comprise a step of administering an effective amount of a modified neurotoxin to the spinal cord.

[0454] “A therapeutically effective amount” as used herein refers to the amount of each therapeutic agent of the present disclosure required to confer therapeutic effect on the subject, either alone or in combination with one or more other therapeutic agents. Effective amounts vary, as recognized by those skilled in the art, depending on the particular condition being treated, the severity of the condition, the individual subject parameters including age, physical condition, size, gender and weight, the duration of the treatment, the nature of concurrent therapy (if any), the specific route of administration and like factors within the knowledge and expertise of the health practitioner. These factors are well known to those of ordinary skill in the art and can be addressed with no more than routine experimentation. It is generally preferred that a maximum dose of the individual components or combinations thereof be used, that is, the highest safe dose according to sound medical judgment. It will be understood by those of ordinary skill in the art, however, that a subject may insist upon a lower dose or tolerable dose for medical reasons, psychological reasons or for virtually any other reasons. Empirical considerations, such as the half-life, generally will contribute to the determination of the dosage. For example, therapeutic agents that are compatible with the human immune system, such as polypeptides comprising regions from humanized antibodies or fully human antibodies, may be used to prolong half-life of the polypeptide and to prevent the polypeptide being attacked by the host's immune system.

[0455] Frequency of administration may be determined and adjusted over the course of therapy, and is generally, but not necessarily, based on treatment and/or suppression and/or amelioration and/or delay of a disease. Alternatively, sustained continuous release formulations of a polypeptide may be appropriate. Various formulations and devices for achieving sustained release are known in the art. In some embodiments, dosage is daily, every other day, every three days, every four days, every five days, or every six days. In some embodiments, dosing frequency is once every week, every 2 weeks, every 4 weeks, every 5 weeks, every 6 weeks, every 7 weeks, every 8 weeks, every 9 weeks, or every 10 weeks; or once every month, every 2 months, or every 3 months, or longer. The progress of this therapy is easily monitored by conventional techniques and assays.

[0456] The dosing regimen (including the polypeptide used) can vary over time. In some embodiments, for an adult subject of normal weight, doses ranging from about 0.01 to 1000 mg/kg may be administered. In some embodiments, the dose is between 1 to 200 mg. The particular dosage regimen, i.e., dose, timing and repetition, will depend on the particular subject and that subject's medical history, as well as the properties of the polypeptide (such as the half-life of the polypeptide, and other considerations well known in the art).

[0457] For the purpose of the present disclosure, the appropriate dosage of a therapeutic agent as described herein will depend on the specific agent (or compositions thereof) employed, the formulation and route of administration, the type and severity of the disease, whether the polypeptide is administered for preventive or therapeutic purposes, previous therapy, the subject's clinical history and response to the antagonist, and the discretion of the attending physician. Typically the clinician will administer a polypeptide until a dosage is reached that achieves the desired result.

[0458] Administration of one or more polypeptides can be continuous or intermittent, depending, for example, upon the recipient's physiological condition, whether the purpose of the administration is therapeutic or prophylactic, and other factors known to skilled practitioners. The administration of a polypeptide may be essentially continuous over a preselected period of time or may be in a series of spaced dose, e.g., either before, during, or after developing a disease. As used herein, the term “treating” refers to the application or administration of a polypeptide or composition including the polypeptide to a subject in need thereof.

[0459] “A subject in need thereof”, refers to an individual who has a disease, a symptom of the disease, or a predisposition toward the disease, with the purpose to cure, heal, alleviate, relieve, alter, remedy, ameliorate, improve, or affect the disease, the symptom of the disease, or the predisposition toward the disease. In some embodiments, the subject has CDI. In some embodiments, the subject has cancer. In some embodiments, the subject is a mammal. In some embodiments, the subject is a non-human primate. In some embodiments, the subject is human. Alleviating a disease includes delaying the development or progression of the disease, or reducing disease severity. Alleviating the disease does not necessarily require curative results.

[0460] As used therein, “delaying” the development of a disease means to defer, hinder, slow, retard, stabilize, and/or postpone progression of the disease. This delay can be of varying lengths of time, depending on the history of the disease and/or individuals being treated. A method that “delays” or alleviates the development of a disease, or delays the onset of the disease, is a method that reduces probability of developing one or more symptoms of the disease in a given time frame and/or reduces extent of the symptoms in a given time frame, when compared to not using the method. Such comparisons are typically based on clinical studies, using a number of subjects sufficient to give a statistically significant result.

[0461] “Development” or “progression” of a disease means initial manifestations and/or ensuing progression of the disease. Development of the disease can be detectable and assessed using standard clinical techniques as well known in the art. However, development also refers to progression that may be undetectable. For purpose of this disclosure, development or progression refers to the biological course of the symptoms. “Development” includes occurrence, recurrence, and onset.

[0462] As used herein “onset” or “occurrence” of a disease includes initial onset and/or recurrence. Conventional methods, known to those of ordinary skill in the art of medicine, can be used to administer the isolated polypeptide or pharmaceutical composition to the subject, depending upon the type of disease to be treated or the site of the disease. This composition can also be administered via other conventional routes, e.g., administered orally, parenterally, by inhalation spray, topically, rectally, nasally, buccally, vaginally or via an implanted reservoir.

[0463] The term “parenteral” as used herein includes subcutaneous, intracutaneous, intravenous, intramuscular, intraarticular, intraarterial, intrasynovial, intrasternal, intrathecal, intralesional, and intracranial injection or infusion techniques. In addition, it can be administered to the subject via injectable depot routes of administration such as using 1-, 3-, or 6-month depot injectable or biodegradable materials and methods.

[0464] As used herein, a “subject” refers to a human or animal. Usually, the animal is a vertebrate such as a primate, rodent, domestic animal or game animal. Primates include chimpanzees, cynomologous monkeys, spider monkeys, and macaques, e.g., Rhesus. Rodents include mice, rats, woodchucks, ferrets, rabbits and hamsters. Domestic and game animals include cows, horses, pigs, deer, bison, buffalo, feline species, e.g., domestic cat, canine species, e.g., dog, fox, wolf, avian species, e.g., chicken, emu, ostrich, and fish, e.g., trout, catfish and salmon. Patient or subject includes any subset of the foregoing, e.g., all of the above, but excluding one or more groups or species such as humans, primates or rodents. In certain embodiments of the aspects described herein, the subject is a mammal, e.g., a primate, e.g., a human.

[0465] The terms, “patient” and “subject” are used interchangeably herein. A subject can be male or female. A subject can be a fully developed subject (e.g., an adult) or a subject undergoing the developmental process (e.g., a child, infant or fetus). Preferably, the subject is a mammal. The mammal can be a human, non-human primate, mouse, rat, dog, cat, horse, or cow, but are not limited to these examples. Mammals other than humans can be advantageously used as subjects that represent animal models of disorders associated with unwanted neuronal activity. In addition, the methods and compositions described herein can be used to treat domesticated animals and/or pets.

### REFERENCES: DETAILED DESCRIPTION

[0466] 1. Schiavo, G., Matteoli, M. & Montecucco, C. Neurotoxins affecting neuroexocytosis. Physiol Rev 80, 717-766 (2000).
[0467] 2. Dong, M., Masuyer, G. & Stenmark, P. Botulinum and Tetanus Neurotoxins. Annu Rev Biochem 88, 811-837 (2019).
[0468] 3. Johnson, E. A. Clostridial toxins as therapeutic agents: benefits of nature's most toxic proteins. Annu Rev Microbiol 53, 551-575 (1999).
[0469] 4. Aoki, K. R. Botulinum toxin: a successful therapeutic protein. Curr Med Chem 11, 3085-3092 (2004).
[0470] 5. Montecucco, C. & Molgo, J. Botulinal neurotoxins: revival of an old killer. Curr Opin Pharmacol 5, 274-279 (2005).
[0471] 6. Lange, O., Bigalke, H., Dengler, R., Wegner, F., deGroot, M. & Wohlfarth, K. Neutralizing antibodies and secondary therapy failure after treatment with botulinum toxin type A: much ado about nothing? Clin Neuropharmacol 32, 213-218 (2009).
[0472] 7. Chapman, M. A., Barron, R., Tanis, D. C., Gill, C. E. & Charles, P. D. Comparison of botulinum neurotoxin preparations for the treatment of cervical dystonia. Clin Ther 29, 1325-1337 (2007).
[0473] 8. Cote, T. R., Mohan, A. K., Polder, J. A., Walton, M. K. & Braun, M. M. Botulinum toxin type A injections: adverse events reported to the US Food and Drug Administration in therapeutic and cosmetic cases. J Am Acad Dermatol 53, 407-415 (2005).
[0474] 9. Dong, M., Tepp, W. H., Liu, H., Johnson, E. A. & Chapman, E. R. Mechanism of botulinum neurotoxin B and G entry into hippocampal neurons. J Cell Biol 179, 1511-1522 (2007).
[0475] 10. Peng, L., Tepp, W. H., Johnson, E. A. & Dong, M. Botulinum neurotoxin D uses synaptic vesicle protein SV2 and gangliosides as receptors. PLoS Pathog 7, e1002008 (2011).
[0476] 11. Dong, M., Richards, D. A., Goodnough, M. C., Tepp, W. H., Johnson, E. A. & Chapman, E. R. Synaptotagmins I and II mediate entry of botulinum neurotoxin B into cells. J Cell Biol 162, 1293-1303 (2003).
[0477] 12. Nishiki, T., Kamata, Y., Nemoto, Y., Omori, A., Ito, T., Takahashi, M. & Kozaki, S. Identification of protein receptor for Clostridium botulinum type B neurotoxin in rat brain synaptosomes. J Biol Chem 269, 10498-10503 (1994).
[0478] 13. Rummel, A., Karnath, T., Henke, T., Bigalke, H. & Binz, T. Synaptotagmins I and II act as nerve cell receptors for botulinum neurotoxin G. J Biol Chem 279, 30865-30870 (2004).
[0479] 14. Peng, L., Berntsson, R. P., Tepp, W. H., Pitkin, R. M., Johnson, E. A., Stenmark, P. & Dong, M. Botulinum neurotoxin D-C uses synaptotagmin I/II as receptors and human synaptotagmin II is not an effective receptor for type B, D-C, and G toxins. J Cell Sci (2012).
[0480] 15. Jin, R., Rummel, A., Binz, T. & Brunger, A. T. Botulinum neurotoxin B recognizes its protein receptor with high affinity and specificity. Nature 444, 1092-1095 (2006).
[0481] 16. Chai, Q., Arndt, J. W., Dong, M., Tepp, W. H., Johnson, E. A., Chapman, E. R. & Stevens, R. C. Structural basis of cell surface receptor recognition by botulinum neurotoxin B. Nature 444, 1096-1100 (2006).
[0482] 17. Benoit, R. M., Frey, D., Hilbert, M., Kevenaar, J. T., Wieser, M. M., Stirnimann, C. U., McMillan, D., Ceska, T., Lebon, F., Jaussi, R., Steinmetz, M. O., Schertler, G. F., Hoogenraad, C. C., Capitani, G. & Kammerer, R. A. Structural basis for recognition of synaptic vesicle protein 2C by botulinum neurotoxin A. Nature 505, 108-111 (2014).
[0483] 18. Dong, M., Liu, H., Tepp, W. H., Johnson, E. A., Janz, R. & Chapman, E. R. Glycosylated SV2A and SV2B mediate the entry of botulinum neurotoxin E into neurons. Mol Biol Cell 19, 5226-5237 (2008).
[0484] 19. Dong, M., Yeh, F., Tepp, W. H., Dean, C., Johnson, E. A., Janz, R. & Chapman, E. R. SV2 is the protein receptor for botulinum neurotoxin A. Science 312, 592-596 (2006).
[0485] 20. Mahrhold, S., Rummel, A., Bigalke, H., Davletov, B. & Binz, T. The synaptic vesicle protein 2C mediates the uptake of botulinum neurotoxin A into phrenic nerves. FEBS Lett 580, 2011-2014 (2006).
[0486] 21. Rummel, A., Hafner, K., Mahrhold, S., Darashchonak, N., Holt, M., Jahn, R., Beermann, S., Karnath, T., Bigalke, H. & Binz, T. Botulinum neurotoxins C, E and F bind gangliosides via a conserved binding site prior to stimulation-dependent uptake with botulinum neurotoxin F utilising the three isoforms of SV2 as second receptor. J Neurochem 110, 1942-1954 (2009).
[0487] 22. Fu, Z., Chen, C., Barbieri, J. T., Kim, J. J. & Baldwin, M. R. Glycosylated SV2 and gangliosides as dual receptors for botulinum neurotoxin serotype F. Biochemistry 48, 5631-5641 (2009).
[0488] 23. Montecucco, C. How do tetanus and botulinum toxins bind to neuronal membranes? TIBS 11, 314-317 (1986).
[0489] 24. Peck, M. W., Smith, T. J., Anniballi, F., Austin, J. W., Bano, L., Bradshaw, M., Cuervo, P., Cheng, L. W., Derman, Y., Dorner, B. G., Fisher, A., Hill, K. K., Kalb, S. R., Korkeala, H., Lindstrom, M., Lista, F., Luquez, C., Mazuet, C., Pirazzini, M., Popoff, M. R., Rossetto, O., Rummel, A., Sesardic, D., Singh, B. R. & Stringer, S. C. Historical Perspectives and Guidelines for Botulinum Neurotoxin Subtype Nomenclature. Toxins (Basel) 9(2017).
[0490] 25. Pier, C. L., Chen, C., Tepp, W. H., Lin, G., Janda, K. D., Barbieri, J. T., Pellett, S. & Johnson, E. A. Botulinum neurotoxin subtype A2 enters neuronal cells faster than subtype A1. FEBS Lett 585, 199-206 (2011).
[0491] 26. Yao, G., Zhang, S., Mahrhold, S., Lam, K. H., Stern, D., Bagramyan, K., Perry, K., Kalkum, M., Rummel, A., Dong, M. & Jin, R. N-linked glycosylation of SV2 is required for binding and uptake of botulinum neurotoxin A. Nat Struct Mol Biol 23, 656-662 (2016).
[0492] 27. Barash, J. R. & Arnon, S. S. A novel strain of Clostridium botulinum that produces type B and type H botulinum toxins. J Infect Dis 209, 183-191 (2014).
[0493] 28. Zhang, S., Masuyer, G., Zhang, J., Shen, Y., Lundin, D., Henriksson, L., Miyashita, S. I., Martinez-Carranza, M., Dong, M. & Stenmark, P. Identification and characterization of a novel botulinum neurotoxin. Nat Commun 8, 14130 (2017).
[0494] 29. Popp, M. W., Antos, J. M., Grotenbreg, G. M., Spooner, E. & Ploegh, H. L. Sortagging: a versatile method for protein labeling. Nat Chem Biol 3, 707-708 (2007).
[0495] 30. Aoki, K. R. A comparison of the safety margins of botulinum neurotoxin serotypes A, B, and F in mice. Toxicon 39, 1815-1820 (2001).
[0496] 31. Arnon, S. S., Schechter, R., Inglesby, T. V., Henderson, D. A., Bartlett, J. G., Ascher, M. S., Eitzen, E., Fine, A. D., Hauer, J., Layton, M., Lillibridge, S., Osterholm, M. T., O'Toole, T., Parker, G., Perl, T. M., Russell, P. K., Swerdlow, D. L. & Tonat, K. Botulinum toxin as a biological weapon: medical and public health management. Jama 285, 1059-1070 (2001).
[0497] 32. Montal, M. Botulinum neurotoxin: a marvel of protein design. Annu Rev Biochem 79, 591-617 (2010).
[0498] 33. Rossetto, O., Pirazzini, M. & Montecucco, C. botulinum neurotoxins: genetic, structural and mechanistic insights. Nat Rev Microbiol 12, 535-549 (2014).
[0499] 34. Pirazzini, M., et al. Thioredoxin and its reductase are present on synaptic vesicles, and their inhibition prevents the paralysis induced by botulinum neurotoxins. Cell Rep 8, 1870-1878 (2014).
[0500] 35. Pirazzini, M., et al. The thioredoxin reductase—Thioredoxin redox system cleaves the interchain disulphide bond of botulinum neurotoxins on the cytosolic surface of synaptic vesicles. Toxicon 107, 32-36 (2015).
[0501] 36. JaHN, R. & Scheller, R. H. SNAREs—engines for membrane fusion. Nat Rev Mol Cell Biol 7, 631-643 (2006).
[0502] 37. Sudhof, T. C. & Rothman, J. E. Membrane fusion: grappling with SNARE and SM proteins. Science 323, 474-477 (2009).
[0503] 38. Gu, S., et al. Botulinum neurotoxin is shielded by NTNHA in an interlocked complex. Science 335, 977-981 (2012).
[0504] 39. Lee, K., et al. Molecular basis for disruption of E-cadherin adhesion by botulinum neurotoxin A complex. Science 344, 1405-1410 (2014).
[0505] 40. Lee, K., et al. Molecular basis for disruption of E-cadherin adhesion by botulinum neurotoxin A complex. Science 344, 1405-1410 (2014).
[0506] 41. Sugawara, Y., et al. Botulinum hemagglutinin disrupts the intercellular epithelial barrier by directly binding E-cadherin. J Cell Biol 189, 691-700 (2010).
[0507] 42. Hill, K. K., Xie, G., Foley, B. T. & Smith, T. J. Genetic diversity within the botulinum neurotoxin-producing bacteria and their neurotoxins. Toxicon 107, 2-8 (2015).

### EXAMPLES

### Example 1

[0508] Botulinum neurotoxins (BoNTs) are a family of bacterial toxins that target and enter nerve terminals and then act as a protease to cleave key proteins required for neurotransmitter release, thus inducing flaccid paralysis of muscles. Members of BoNTs, such as BoNT/A, have been utilized to treat a wide range of medical conditions as well as for cosmetic purposes of reducing wrinkles. A local injection of a tiny amount of BoNT/A can induce relaxation of muscles for 3-6 months in humans. However, an issue with clinical use of BoNT/A is that patients may generate neutralizing antibodies. Because the chance of generating neutralizing antibodies is directly related to injected doses, lowering the toxin therapeutic doses is highly desired, which means the efficacy of individual toxin molecules has to be enhanced. Here, an approach was developed to enhance BoNT efficacy and therapeutic duration by “de-lysine” the lysine residues on the surface of the BoNT protease domain. Using this approach, BoNT/A protease domain mutants containing substitutions of surface lysine residues into arginines were systemically designed and tested. A set of mutations that significantly enhanced the efficacy than the wild-type protease domain were identified. Their enhanced efficacy was validated in the context of full-length BoNT/A on both cultured neurons and in vivo in mouse models. These improved protease domains can be utilized to create a new generation of BoNT/A and other chimeric BoNT molecules for therapeutic uses by providing enhanced therapeutic efficacy, longer therapeutic duration, and lower chances of inducing neutralizing antibodies than currently available BoNTs.

[0509] Botulinum neurotoxins are a family of bacterial toxins, including seven major serotypes (BoNT/A-G)^{1,2}. These toxins act by blocking neurotransmitter release from neurons, thus paralyzing animals and humans. In recent years, BoNTs have been widely used to treat a growing list of medical conditions: local injections of minute amount of toxins can attenuate neuronal activity in targeted regions, which can be beneficial in many medical conditions as well as for cosmetic purposes³⁻⁵.

[0510] BoNT/A and BoNT/B are the only two BoNTs that are currently FDA-approved for use in humans³⁻⁵. These are toxins purified from bacteria without any sequence modifications (defined as wild type, WT). As the application of BoNTs grows, limitations and adverse effects have been reported. The major limitation is the generation of neutralizing antibodies in patients, which renders future treatment ineffective⁶. Termination of BoNT usage often leaves patients with no other effective ways to treat/relieve their disorders. The possibility of antibody responses is directly related to both toxin doses and the frequency of injection⁶.

[0511] The major adverse effects largely due to diffusion of toxins to other regions of the body and the possibility of toxin diffusion is directly related to injected doses. The adverse effects ranges from transient non-serious events such as ptosis and diplopia to life-threatening events even death^{7,8}. In a petition letter filed in 2008 by Dr. Sidney Wolfe to FDA, a total of 180 serious adverse events, including 16 deaths have been documented. As a result, FDA now requires the “Black box warning” on all BoNT products, highlighting the risk of the spread of toxins, following similar warnings issued by the European Union.

[0512] Because both the generation of neutralizing antibodies and toxin diffusion are directly related to injected doses, lowering toxin doses (while maintaining the same levels of toxin activity) is highly desired, which means the efficacy of individual toxin molecule to induce local muscle paralysis has to be enhanced. Such modified BoNTs with improved local efficacy will also reduce any potential off-target effects due to toxin diffusion to other regions. Besides injection dose, more frequent injections also lead to higher chances of inducing neutralizing antibodies. Thus, extending therapeutic duration of each injection is another major goal of improving BoNTs for therapeutic uses. BoNTs such as BoNT/A has showed long half-life in neurons and induces persistent muscle paralysis in humans for 3-6 months. This relatively long duration is a key pharmacological property that enables medical use of BoNTs. Further extending this therapeutic duration is highly desirable, as it will reduce the frequency of repeated toxin injection, reducing both the cost for the patients and the chance of generating neutralizing antibodies.

[0513] BoNTs are composed of three functional domains (FIG. 1A)²: (1) the C-terminal receptor-binding domain (H_{C}, ˜50 kDa); (2) the membrane translocation domain in the middle (H_{N}, ˜50 kDa); (3) the N-terminal protease domain (also known as light chain, LC, ˜50 kDa). Correspondingly, BoNTs has three major steps for their action (FIG. 1B): (1) receptor binding: these toxins target motor nerve terminals by first binding specifically to their receptors expressed in neurons; (2) translocation: after binding to receptors, BoNTs enter cells via receptor-mediated endocytosis into endosomes, and the low pH conditions within endosomes then induces conformational changes of toxin, resulting in its penetration of endosomal membrane and release of its protease domain into the cytosol of neurons; (3) substrate cleavage: within the cytosol of neurons, the released LC of BoNTs then cleave proteins required for synaptic transmission, therefore blocking neurotransmission².

[0514] Enhancing the efficacy of BoNTs can be achieved by improving (1) receptor-binding capability; (2) translocation efficiency; (3) LC enzymatic activity and duration. The therapeutic duration is largely determined by how fast the amount of toxin molecules falls below the effective dose inside neurons, which is a combination of two factors (1) total numbers of toxin LC entering neurons; (2) half-life of each LC inside neurons.

[0515] Previous studies have showed that the efficacy of BoNTs can be improved by enhancing receptor-bindine^{9,10} and improving translocation 11 through designed point mutations. Mutations in toxin LC that enhance its enzymatic activity 12 or oxidative stability 13 have been previously designed and evaluated, but they did not lead to any enhancement of toxin efficacy or duration compared with WT toxin.

[0516] Among the three functional domains of BoNT, LC plays critical role in determining duration of action and overall activity. Replacing the surface lysine (K) residues of BoNT-LCs to similar arginine (R) residues may improve LCs for the following rationales: (1) lysine is the site for ubiquitination, which leads to degradation of LCs in cells through ubiquitin-proteasome pathway. Reducing the numbers of lysine in LCs (“de-lysine”) can decrease its chance to be ubiquitinated, thus potentially extending its half-life. (2) Arginine, which is a positively charged amino acid similar to lysine, has higher pKa value than lysine. Arginine maintains its charge during membrane translocation, whereas lysine is readily deprotonated to become a neutral residue in the membrane. Therefore, proteins containing arginine would be easier to translocate through membranes than proteins containing lysines.

[0517] The approach to “de-lysine” mutant LCs was a combination of structure-assisted design and consensus mutagenesis based on naturally occurring BoNT variant sequences. Recent progresses in genomic sequencing revealed that there are a growing number of subtype sequences within each major serotype of BoNTs¹⁸. For instance, BoNT/A currently contains at least 8 subtypes (A1-A8), with a total of 37 distinct sequences (https://bontbase.org/). There are as much as 15% differences at protein levels among these subtypes. These naturally-occurred subtype sequences offer a vast resource to guide mutagenesis. For example, residues that are conserved across majority of variant (consensus sequence) are likely critical for proper folding and function the molecular, and thus cannot be altered¹⁹. On the other hand, residues that are not conserved across variants are likely the ones that can be mutated without affecting the property of the toxin. Both the structure information and consensus sequences were utilized to design and evaluate “de-lysine” K to R mutations in BoNT/A-LC.

[0518] Design of K to R Mutations of LC/A1

[0519] The crystal structure of BoNT/A1-LC (LC/A1) revealed that it has 35 lysines including 33 on its surface and two (K166 and K320) located inside the molecule (FIG. 2A). To avoid any detrimental effect caused by the K-to-R mutation, the LC sequence of A1 were aligned to A8 (FIG. 2B). There are 18 lysines on A1-LC that are conserved across subtypes, suggesting that they are critical for proper folding and/or function (FIG. 2C). Six lysines in A1 (K11, K335, K337, K343, K375 and K415) are already altered to R in some subtype sequences (FIG. 2C), and the remaining 10 non-conserved surface lysines (K41, K212, K272, K289, K291, K299, K318, K340, K356 and K381) are replaced by non-charged or negatively charged amino acids in other subtypes (FIG. 2C). Based on this consensus sequence analysis, it was decided to focus on these 16 non-conserved lysines to perform K to R mutagenesis on the standard BoNT/A1 sequence.

[0520] To approach the mutagenesis systematically, these 16 mutation sites were divided in four groups (FIG. 3A). The first group (Group 0), designated KR6, contains 6 mutation sites (11, 335, 337, 343, 375, 415) that are already R in other BoNT/A subtypes. Group 1 contain mutations at residues 41, 318, and 340, which are located near or at the binding interface with the toxin substrate SNAP-25²⁰. Group 2 contains mutations at 289, 291, 299, and 381, which are residues that are away from SNAP-25 binding region. Group 3 contains mutations at 212, 272, and 356, which are located between LC and H_{N}. Combinational mutations were designed as KR9 (KR6+group 1); KR10 (KR6+group 2); KR13 (KR6+groups 1 and 2); and KR16 (KR6+groups 1, 2, and 3).

[0521] Experimental Validation of BoNT/A1 Mutations

[0522] These selected mutations were next evaluated to determine if the mutations enhance the overall efficacy of BoNT/A1. To ensure biosafety, cDNA sequences that encode full-length toxin or develop any live organisms that may harbor the full toxin gene were not produced. Instead, a previously developed sortase-mediated ligation method was used (FIG. 3B)^{21,22}. This method relies on producing two separated pieces of BoNTs: one is the LC-H_{N} fragment with a sortase recognition site at the C-terminus; the other piece is the H_{C} with a free glycine at its N-terminus. Each piece alone is not toxic. The two proteins together can then be ligated biochemically by adding sortase (a bacterial transpeptidase), which recognizes the sortase tag (LPETG) and ligates it to the glycine at the N-terminal of H_{C}, thus producing a full-length toxin protein, without ever having the coding sequence for the full-length toxin. In this way, the amount of toxins produced in the test tube can be precisely controlled to ensure that the total amount is below the exempted amount for BoNTs (<1 mg).

[0523] WT and KR mutants of LCH_{N}/A1 were produced in E. coli, and then ligated to H_{C}/A1, generating full length toxins at ˜150 kDa (FIG. 3C). The linker region between the LC and H_{N} needs to be separated by proteases in order to be able to release LC upon its entry into the cytosol. This process is known as “activation” and activated LC-H_{N} remain connected by an inter-chain disulfide bond before reaching the cytosol. To facilitate the activation step, a thrombin cleavage site was introduced between LC and H_{N}. Treatment of thrombin resulted in almost complete activation of these ligated toxins (FIG. 3C).

[0524] The activity of WT versus KR mutants were compared in cultured rat cortical neurons. Cultured rat cortical neurons were exposed to WT, KR6, KR9, KR10, and KR16 full-length BoNT/A1 at three different concentrations (500, 50, and 5 pM) for 12 hours. In addition, WT, KR10, KR13, and KR16 were also examined at 50, 15, and 5 pM concentrations (FIG. 3D, lower panel). Entry of the toxin will result in cleavage of its substrate, a protein named SNAP-25, in neurons, which can be detected by immunoblot of cell lysates. The cleaved SNAP-25 can still be detected by the antibody used, showing up as a band with smaller molecular weight than the intact SNAP-25 (FIG. 3D). Compared with WT toxin, KR6, KR9, KR10, and KR16 showed a slightly enhanced cleavage of SNAP-25 at 5 pM concentration, suggesting that these KR mutations have a higher level of efficacy on cortical neurons than WT toxin. The enhanced cleavage of SNAP-25 is further confirmed for KR10 and KR16 at both 50 and 15 pM as well (FIG. 3D, lower panel).

[0525] All these ligated toxins were evaluated and compared in vivo for their efficacy in inducing local muscle paralysis using a well-established mouse Digit Abduction Score (DAS) assay²³. A tiny amount of ligated toxin was injected into the hind leg of mice, and paralysis of this leg leads to loss of ability to spread the toe during startle response. The degree of toe spread reflects the degree of muscle paralysis, and can be quantified on the scale of 0-4, with 0 represents no paralysis and 4 represents the severest paralysis (FIG. 4A). The equal amount of WT and KR mutant toxins were injected and the DAS scores were recorded. As shown in FIG. 4B, all KR mutants showed higher DAS scores (reflecting potency) than WT toxin. KR6, KR9, KR13, and KR16 performed similarly, whereas KR10 is clearly the best with the longest duration of score 4. The therapeutic duration (TD) can be defined as the time that the DAS scores staying above 2. Compare to WT toxin with TD ˜3 days, the same dose of KR6, KR9, KR13, and KR16 showed TD of ˜6 days, and KR10 showed TD of ˜11 days (FIG. 4B), more than 3-fold extension of TD. Further adding additional KR mutations from groups 1 and 3 to KR10, which generates a series of KR11, did not improve the in vivo activity, with KR10 still the most potent modified BoNT (FIG. 4C).

[0526] To further compare WT and KR10 mutant toxins, three different doses of toxins were injected (15, 30, and 75 pg for WT, and 5, 10 and 25 pg for KR10). Both toxins elicited a dose-dependent response in the DAS mean (FIGS. 4D and 4E). KR10 clearly showed higher potency at all three doses than WT toxin. The increase in potency is >3-fold. For example, 10 pg of KR10 induced a higher DAS score than 30 pg of WT toxin, and 25 pg KR10 also induced higher DAS score than 75 pg of WT toxin. The DAS score for 5 pg KR10 is slightly lower than 30 pg of WT toxin, suggesting that the overall enhancement in potency is between 3 to 6-fold over WT toxin.

[0527] A series of additional mutations were generated and tested as listed in Table 1. Mutations that include conserved lysine sites are often not soluble (Table 1).

[0528] Combination with Other Mutations in H_{C} and in the Context of Chimeric Toxins

[0529] It was explored whether the benefit of KR10 mutations can be combined with additional mutations in receptor binding (H_{C}) domain to create a BoNT/A1 mutant with further enhanced activity. A series of point mutations were previously identified within H_{C}/A that enhance its binding to neurons (U.S. Application 63/128,758, which is incorporated by reference herein in its entirety). Two representative H_{C} mutations, R1156M and T1232R, were selected and ligated to the KR10-LC-H_{N}. 5 pg of the full-length ligated toxin were injected in DAS assays. Both KR10-R1156M and KR10-T1232R showed higher level of potency than KR10 mutant alone, with KR10-T1232R performing best (FIG. 5A). These results demonstrate that the benefit of KR10 and mutations in H_{C}/A can be combined to generate the better BoNT/A mutants with further enhanced potency than mutations in individual domains.

[0530] Finally, it was evaluated whether the benefit of KR10 can be maintained in the context of chimeric toxins. WT or KR10 LCH_{N} of BoNT/A1 were ligated with the WT BoNT/B1 H_{C} and compared using DAS assays. As shown in FIG. 5B, KR10-AB could reach score 3, while WT AB only reached score 2, suggesting the enhanced efficacy from KR10 is maintained in the context of chimeric toxins and demonstrate that KR10 LC/A1 can be utilized to construct chimeric toxins.

[0531] Together, these results demonstrate that changing lysines into arginines on the surface of A1-LC made the full-length toxin more potent in vitro and in vivo. These mutations can be used to create a new generation of BoNT/A with improved efficacy compared to the natural BoNT/A. These mutations can also be introduced to other, potentially superior A subtypes (e.g. A2 and A6) in addition to A1 to create novel engineered toxin with improved potency, because they share most of surface lysines on the corresponding positions. The light chain of BoNT/A containing these mutations can also be utilized to create chimeric toxins, such as BoNT/AB.

[0532] Materials and Methods

[0533] Antibodies and materials: Mouse monoclonal antibody for SNAP25 (C171.2) was generously provided by E. Chapman (Madison, WI) and are available from Synaptic Systems (Goettingen, Germany). Mouse monoclonal antibody for actin was purchased from Sigma (AC-15).

[0534] cDNA and constructs: The cDNAs encoding BoNT/A1-LC (residues 1-441) with KR6 and KR16 mutations were synthesized by Genewiz Inc. and its codon has been optimized for expression in E. coli. The DNAs encoding BoNT/A1-KR mutants were subcloned into pET28a vector containing H_{N}/A1 with both a LPETGG (SEQ ID NO: 130) tag for sortase ligation and a His6 tag for purification at the C-terminus of the H_{N}. A thrombin cleavage site was introduced between LC and H_{N} sequences. Other KR mutants were generated by site-directed mutagenesis using KR6 or KR16 as PCR templates. DNA encoding BoNT/A1-H_{C} was obtained from a previous study²⁶, but the non-essential HA tag was removed from the construct. All constructs were verified by sequencing.

[0535] Protein expression, purification and activation: WT and mutants of BoNT/A1-LCH_{N} were expressed as His6 tagged recombinant proteins in E. coli BL21(DE3) strain with the induction temperature at 18° C. overnight in the autoinduction medium (Formedium, Ltd.). His6-fusion proteins were purified using Ni-NTA bead charged column. Briefly, bacterial lysates were incubated with Ni-NTA beads, followed by flow-through of washing buffer (40 mM imidazole, TBS, pH7.5) and elution buffer (100-500 mM imidazole, TBS, pH7.5). Eluted proteins were desalted and digested with thrombin Sepharose bead (BioVision, Inc.). Inactivated proteins were removed using prewashed Ni-NTA beads, and supernatant (activated proteins) was concentrated, quantified and frozen (−80° C.) until use.

[0536] Sortase-mediated ligation: 4 μM of substrate proteins, LC-H_{N} and H_{C} were premixed with TBS, pH7.5 containing 10 mM CaCl₂. 0.5 μM of recombinant sortase was added and incubated for 40 min at room temperature. Prewashed Ni-NTA beads were loaded to remove His-tagged sortase and unligated substrate proteins. Supernatant was only activated using 25 U/ml thrombin (Millipore) for 40 min at room temperature. Some of ligated products were analyzed on the SDS-PAGE gel with or without 2-mercaptoethanol to confirm ligation and activation. Full-length toxins were quantified based on protein density on the gel using BSA as a standard (0.15-0.9 μg).

[0537] Neuron culture and SNAP25 cleavage assays: Rat cortical neurons were prepared from E18-19 embryos as described previously²⁷. The quantified full-length toxins were mixed with medium, where the neurons were cultured. After desired incubation time, cells were washed and subjected to immunoblotting analysis.

[0538] Digit Abduction Score (DAS) assay. All procedures were conducted in accordance with the guidelines approved by the Institute Animal Care and Use Committee (IACUC) at Boston Children's Hospital (#3030). Briefly, full-length BoNT/A1-WT or KR mutants generated by sortase-mediated ligation and thrombin activation were diluted with 0.2% of gelatin-containing phosphate buffer. Mice (CD-1 strain, female, purchased from Envigo, 5-6 weeks old, 21-25 g) were anesthetized with isoflurane (3-4%) and injected with the prepared full-length toxin (10 μL) using a 30-gauge needle attached to a sterile Hamilton syringe, into the gastrocnemius muscles of the right hind limb. Muscle paralysis and the spread of hind paw in response to a startle stimulus were observed according to FIG. 4A.

[0539] Various aspects of the present disclosure may be used alone, in combination, or in a variety of arrangements not specifically discussed in the embodiments described in the foregoing and is therefore not limited in its application to the details and arrangement of components set forth in the foregoing description or illustrated in the drawings. For example, aspects described in one embodiment may be combined in any manner with aspects described in other embodiments.

[0540] Also, the embodiments described herein may be embodied as a method, of which an example has been provided. The acts performed as part of the method may be ordered in any suitable way. Accordingly, embodiments may be constructed in which acts are performed in an order different than illustrated, which may include performing some acts simultaneously, even though shown as sequential acts in illustrative embodiments.

[0541] Further, some actions are described as taken by a “user.” It should be appreciated that a “user” need not be a single individual, and that in some embodiments, actions attributable to a “user” may be performed by a team of individuals and/or an individual in combination with computer-assisted tools or other mechanisms.

[0542] Also, while embodiments herein are described with respect to controlling flow of air in the device to move the suction tip, it should be appreciated that the other gases in the surgical field may flow in the device to cause the desired movement of the suction tip. In other words, the use of the terms “air” and “airflow” should not be considered as being limited to air, as other gases in the environment/surgical site may be present.

[0543] While the present teachings have been described in conjunction with various embodiments and examples, it is not intended that the present teachings be limited to such embodiments or examples. On the contrary, the present teachings encompass various alternatives, modifications, and equivalents, as will be appreciated by those of skill in the art. Accordingly, the foregoing description and drawings are by way of example only.

TABLE 1
All the tested KR and non-K-to-R mutants

| | | |
|---|---|---|
| Construct name | Sequence information | Full-length toxin activity |

K-to-R mutants

| | | |
|---|---|---|
| KR6 | K11R, K335R, K337R, K343R, K375R, K415R | ** |
| KR9 | KR6 + K41R, K318R, K340R | ** |
| KR10 | KR6 + K289R, K291R, K299R, K381R | ** |
| KR11-41 | KR10 + K41R | ** |
| KR11-212 | KR10 + K212R | ** |
| KR11-272 | KR10 + K272R | ** |
| KR11-318 | KR10 + K318R | ** |
| KR11-340 | KR10 + K340R | ** |
| KR11-356 | KR10 + K356R | ** |
| KR13 | KR10 + K41R, K318R, K340R | ** |
| KR15 | KR16 lacking K272R | ** |
| KR16 | KR13 + K212R, K272R, K356R | ** |
| KR26 | KR33 + R41K, R66K, R84K, R93K, R314K, | Rarely expressed |
| | R340K, R371K | |
| KR28 | KR33 + R66K, R84K, R93K, R314K, R371K | Rarely expressed |
| KR29 | KR33 + R41K, R84K, R93K, R371K | Rarely expressed |
| KR30 | KR33 + R84K, R93K, R371K | Rarely expressed |
| KR33 | All K to R mutations except K166 and K320 | Rarely expressed |

Non-K-to-R mutants

| | | |
|---|---|---|
| nKR-Y387R | Y387R | * |
| nKR-M411R | M411R | * |

Other A subtype KR mutants

| | | |
|---|---|---|
| A2-KR7 | K11R, K289R, K291R, K299R, K335R, K337R, | better than A2 WT |
| | K343R | |

similar in vivo activity compared to WT
** at least two times better in vivo toxicity compared to WT

TABLE 2
Amino Acid Sequences of BoNTs

| SEQ ID | | |
|---|---|---|
| NO: | Description | Sequence |
| 1 | BoNT/A1-WT | MPFVNKQFNYKDPVNGVDIAYIKIPNAGQMQPVKAFKIHNKIWVIPERDT |
| | | FTNPEEGDLNPPPEAKQVPVSYYDSTYLSTDNEKDNYLKGVTKLFERIYSTDL |
| | | GRMLLTSIVRGIPFWGGSTIDTELKVIDTNCINVIQPDGSYRSEELNLVIIGPS |
| | | ADIIQFECKSFGHEVLNLTRNGYGSTQYIRFSPDFTFGFEESLEVDTNPLLGA |
| | | GKFATDPAVTLAHELIHAGHRLYGIAINPNRVFKVNTNAYYEMSGLEVSFEE |
| | | LRTFGGHDAKFIDSLQENEFRLYYYNKFKDIASTLNKAKSIVGTTASLQYMK |
| | | NVFKEKYLLSEDTSGKFSVDKLKFDKLYKMLTEIYTEDNFVKFFKVLNRKTYL |
| | | NFDKAVFKINIVPKVNYTIYDGFNLRNTNLAANFNGQNTEINNMNFTKLKN |
| | | FTGLFEFYKLLCVRGIITSKTKSLDKGYNKALNDLCIKVNNWDLFFSPSEDNF |
| | | TNDLNKGEEITSDTNIEAAEENISLDLIQQYYLTFNFDNEPENISIENLSSDIIG |
| | | QLELMPNIERFPNGKKYELDKYTMFHYLRAQEFEHGKSRIALTNSVNEALLN |
| | | PSRVYTFFSSDYVKKVNKATEAAMFLGWVEQLVYDFTDETSEVSTTDKIADI |
| | | TIIIPYIGPALNIGNMLYKDDFVGALIFSGAVILLEFIPEIAIPVLGTFALVSYIAN |
| | | KVLTVQTIDNALSKRNEKWDEVYKYIVTNWLAKVNTQIDLIRKKMKEALEN |
| | | QAEATKAIINYQYNQYTEEEKNNINFNIDDLSSKLNESINKAMININKFLNQC |
| | | SVSYLMNSMIPYGVKRLEDFDASLKDALLKYIYDNRGTLIGQVDRLKDKVN |
| | | NTLSTDIPFQLSKYVDNQRLLSTFTEYIKNIINTSILNLRYESNHLIDLSRYASKI |
| | | NIGSKVNFDPIDKNQIQLFNLESSKIEVILKNAIVYNSMYENFSTSFWIRIPKY |
| | | FNSISLNNEYTIINCMENNSGWKVSLNYGEIIWTLQDTQEIKQRVVFKYSQ |
| | | MINISDYINRWIFVTITNNRLNNSKIYINGRLIDQKPISNLGNIHASNNIMFKL |
| | | DGCRDTHRYIWIKYFNLFDKELNEKEIKDLYDNQSNSGILKDFWGDYLQYD |
| | | KPYYMLNLYDPNKYVDVNNVGIRGYMYLKGPRGSVMTTNIYLNSSLYRGT |
| | | KFIIKKYASGNKDNIVRNNDRVYINVVVKNKEYRLATNASQAGVEKILSALEI |
| | | PDVGNLSQVVVMKSKNDQGITNKCKMNLQDNNGNDIGFIGFHQFNNIAK |
| | | LVASNWYNRQIERSSRTLGCSWEFIPVDDGWGERPL |
| 2 | BoNT/A1-K11R | MPFVNKQFNYRDPVNGVDIAYIKIPNAGQMQPVKAFKIHNKIWVIPERDT |
| | | FTNPEEGDLNPPPEAKQVPVSYYDSTYLSTDNEKDNYLKGVTKLFERIYSTDL |
| | | GRMLLTSIVRGIPFWGGSTIDTELKVIDTNCINVIQPDGSYRSEELNLVIIGPS |
| | | ADIIQFECKSFGHEVLNLTRNGYGSTQYIRFSPDFTFGFEESLEVDTNPLLGA |
| | | GKFATDPAVTLAHELIHAGHRLYGIAINPNRVFKVNTNAYYEMSGLEVSFEE |
| | | LRTFGGHDAKFIDSLQENEFRLYYYNKFKDIASTLNKAKSIVGTTASLQYMK |
| | | NVFKEKYLLSEDTSGKFSVDKLKFDKLYKMLTEIYTEDNFVKFFKVLNRKTYL |
| | | NFDKAVFKINIVPKVNYTIYDGFNLRNTNLAANFNGQNTEINNMNFTKLKN |
| | | FTGLFEFYKLLCVRGIITSKTKSLDKGYNKALNDLCIKVNNWDLFFSPSEDNF |
| | | TNDLNKGEEITSDTNIEAAEENISLDLIQQYYLTFNFDNEPENISIENLSSDIIG |
| | | QLELMPNIERFPNGKKYELDKYTMFHYLRAQEFEHGKSRIALTNSVNEALLN |
| | | PSRVYTFFSSDYVKKVNKATEAAMFLGWVEQLVYDFTDETSEVSTTDKIADI |
| | | TIIIPYIGPALNIGNMLYKDDFVGALIFSGAVILLEFIPEIAIPVLGTFALVSYIAN |
| | | KVLTVQTIDNALSKRNEKWDEVYKYIVTNWLAKVNTQIDLIRKKMKEALEN |
| | | QAEATKAIINYQYNQYTEEEKNNINFNIDDLSSKLNESINKAMININKFLNQC |
| | | SVSYLMNSMIPYGVKRLEDFDASLKDALLKYIYDNRGTLIGQVDRLKDKVN |
| | | NTLSTDIPFQLSKYVDNQRLLSTFTEYIKNIINTSILNLRYESNHLIDLSRYASKI |
| | | NIGSKVNFDPIDKNQIQLFNLESSKIEVILKNAIVYNSMYENFSTSFWIRIPKY |
| | | FNSISLNNEYTIINCMENNSGWKVSLNYGEIIWTLQDTQEIKQRVVFKYSQ |
| | | MINISDYINRWIFVTITNNRLNNSKIYINGRLIDQKPISNLGNIHASNNIMFKL |
| | | DGCRDTHRYIWIKYFNLFDKELNEKEIKDLYDNQSNSGILKDFWGDYLQYD |
| | | KPYYMLNLYDPNKYVDVNNVGIRGYMYLKGPRGSVMTTNIYLNSSLYRGT |
| | | KFIIKKYASGNKDNIVRNNDRVYINVVVKNKEYRLATNASQAGVEKILSALEI |
| | | PDVGNLSQVVVMKSKNDQGITNKCKMNLQDNNGNDIGFIGFHQFNNIAK |
| | | LVASNWYNRQIERSSRTLGCSWEFIPVDDGWGERPL |
| 3 | BoNT/A1-K41R | MPFVNKQFNYKDPVNGVDIAYIKIPNAGQMQPVKAFKIHNRIWVIPERDT |
| | | FTNPEEGDLNPPPEAKQVPVSYYDSTYLSTDNEKDNYLKGVTKLFERIYSTDL |
| | | GRMLLTSIVRGIPFWGGSTIDTELKVIDTNCINVIQPDGSYRSEELNLVIIGPS |
| | | ADIIQFECKSFGHEVLNLTRNGYGSTQYIRFSPDFTFGFEESLEVDTNPLLGA |
| | | GKFATDPAVTLAHELIHAGHRLYGIAINPNRVFKVNTNAYYEMSGLEVSFEE |
| | | LRTFGGHDAKFIDSLQENEFRLYYYNKFKDIASTLNKAKSIVGTTASLQYMK |
| | | NVFKEKYLLSEDTSGKFSVDKLKFDKLYKMLTEIYTEDNFVKFFKVLNRKTYL |
| | | NFDKAVFKINIVPKVNYTIYDGFNLRNTNLAANFNGQNTEINNMNFTKLKN |
| | | FTGLFEFYKLLCVRGIITSKTKSLDKGYNKALNDLCIKVNNWDLFFSPSEDNF |
| | | TNDLNKGEEITSDTNIEAAEENISLDLIQQYYLTFNFDNEPENISIENLSSDIIG |
| | | QLELMPNIERFPNGKKYELDKYTMFHYLRAQEFEHGKSRIALTNSVNEALLN |
| | | PSRVYTFFSSDYVKKVNKATEAAMFLGWVEQLVYDFTDETSEVSTTDKIADI |
| | | TIIIPYIGPALNIGNMLYKDDFVGALIFSGAVILLEFIPEIAIPVLGTFALVSYIAN |
| | | KVLTVQTIDNALSKRNEKWDEVYKYIVTNWLAKVNTQIDLIRKKMKEALEN |
| | | QAEATKAIINYQYNQYTEEEKNNINFNIDDLSSKLNESINKAMININKFLNQC |
| | | SVSYLMNSMIPYGVKRLEDFDASLKDALLKYIYDNRGTLIGQVDRLKDKVN |
| | | NTLSTDIPFQLSKYVDNQRLLSTFTEYIKNIINTSILNLRYESNHLIDLSRYASKI |
| | | NIGSKVNFDPIDKNQIQLFNLESSKIEVILKNAIVYNSMYENFSTSFWIRIPKY |
| | | FNSISLNNEYTIINCMENNSGWKVSLNYGEIIWTLQDTQEIKQRVVFKYSQ |
| | | MINISDYINRWIFVTITNNRLNNSKIYINGRLIDQKPISNLGNIHASNNIMFKL |
| | | DGCRDTHRYIWIKYFNLFDKELNEKEIKDLYDNQSNSGILKDFWGDYLQYD |
| | | KPYYMLNLYDPNKYVDVNNVGIRGYMYLKGPRGSVMTTNIYLNSSLYRGT |
| | | KFIIKKYASGNKDNIVRNNDRVYINVVVKNKEYRLATNASQAGVEKILSALEI |
| | | PDVGNLSQVVVMKSKNDQGITNKCKMNLQDNNGNDIGFIGFHQFNNIAK |
| | | LVASNWYNRQIERSSRTLGCSWEFIPVDDGWGERPL |
| 4 | BoNT/A1-K212R | MPFVNKQFNYKDPVNGVDIAYIKIPNAGQMQPVKAFKIHNKIWVIPERDT |
| | | FTNPEEGDLNPPPEAKQVPVSYYDSTYLSTDNEKDNYLKGVTKLFERIYSTDL |
| | | GRMLLTSIVRGIPFWGGSTIDTELKVIDTNCINVIQPDGSYRSEELNLVIIGPS |
| | | ADIIQFECKSFGHEVLNLTRNGYGSTQYIRFSPDFTFGFEESLEVDTNPLLGA |
| | | GRFATDPAVTLAHELIHAGHRLYGIAINPNRVFKVNTNAYYEMSGLEVSFEE |
| | | LRTFGGHDAKFIDSLQENEFRLYYYNKFKDIASTLNKAKSIVGTTASLQYMK |
| | | NVFKEKYLLSEDTSGKFSVDKLKFDKLYKMLTEIYTEDNFVKFFKVLNRKTYL |
| | | NFDKAVFKINIVPKVNYTIYDGFNLRNTNLAANFNGQNTEINNMNFTKLKN |
| | | FTGLFEFYKLLCVRGIITSKTKSLDKGYNKALNDLCIKVNNWDLFFSPSEDNF |
| | | TNDLNKGEEITSDTNIEAAEENISLDLIQQYYLTFNFDNEPENISIENLSSDIIG |
| | | QLELMPNIERFPNGKKYELDKYTMFHYLRAQEFEHGKSRIALTNSVNEALLN |
| | | PSRVYTFFSSDYVKKVNKATEAAMFLGWVEQLVYDFTDETSEVSTTDKIADI |
| | | TIIIPYIGPALNIGNMLYKDDFVGALIFSGAVILLEFIPEIAIPVLGTFALVSYIAN |
| | | KVLTVQTIDNALSKRNEKWDEVYKYIVTNWLAKVNTQIDLIRKKMKEALEN |
| | | QAEATKAIINYQYNQYTEEEKNNINFNIDDLSSKLNESINKAMININKFLNQC |
| | | SVSYLMNSMIPYGVKRLEDFDASLKDALLKYIYDNRGTLIGQVDRLKDKVN |
| | | NTLSTDIPFQLSKYVDNQRLLSTFTEYIKNIINTSILNLRYESNHLIDLSRYASKI |
| | | NIGSKVNFDPIDKNQIQLFNLESSKIEVILKNAIVYNSMYENFSTSFWIRIPKY |
| | | FNSISLNNEYTIINCMENNSGWKVSLNYGEIIWTLQDTQEIKQRVVFKYSQ |
| | | MINISDYINRWIFVTITNNRLNNSKIYINGRLIDQKPISNLGNIHASNNIMFKL |
| | | DGCRDTHRYIWIKYFNLFDKELNEKEIKDLYDNQSNSGILKDFWGDYLQYD |
| | | KPYYMLNLYDPNKYVDVNNVGIRGYMYLKGPRGSVMTTNIYLNSSLYRGT |
| | | KFIIKKYASGNKDNIVRNNDRVYINVVVKNKEYRLATNASQAGVEKILSALEI |
| | | PDVGNLSQVVVMKSKNDQGITNKCKMNLQDNNGNDIGFIGFHQFNNIAK |
| | | LVASNWYNRQIERSSRTLGCSWEFIPVDDGWGERPL |
| 5 | BoNT/A1-K272R | MPFVNKQFNYKDPVNGVDIAYIKIPNAGQMQPVKAFKIHNKIWVIPERDT |
| | | FTNPEEGDLNPPPEAKQVPVSYYDSTYLSTDNEKDNYLKGVTKLFERIYSTDL |
| | | GRMLLTSIVRGIPFWGGSTIDTELKVIDTNCINVIQPDGSYRSEELNLVIIGPS |
| | | ADIIQFECKSFGHEVLNLTRNGYGSTQYIRFSPDFTFGFEESLEVDTNPLLGA |
| | | GKFATDPAVTLAHELIHAGHRLYGIAINPNRVFKVNTNAYYEMSGLEVSFEE |
| | | LRTFGGHDARFIDSLQENEFRLYYYNKFKDIASTLNKAKSIVGTTASLQYMK |
| | | NVFKEKYLLSEDTSGKFSVDKLKFDKLYKMLTEIYTEDNFVKFFKVLNRKTYL |
| | | NFDKAVFKINIVPKVNYTIYDGFNLRNTNLAANFNGQNTEINNMNFTKLKN |
| | | FTGLFEFYKLLCVRGIITSKTKSLDKGYNKALNDLCIKVNNWDLFFSPSEDNF |
| | | TNDLNKGEEITSDTNIEAAEENISLDLIQQYYLTFNFDNEPENISIENLSSDIIG |
| | | QLELMPNIERFPNGKKYELDKYTMFHYLRAQEFEHGKSRIALTNSVNEALLN |
| | | PSRVYTFFSSDYVKKVNKATEAAMFLGWVEQLVYDFTDETSEVSTTDKIADI |
| | | TIIIPYIGPALNIGNMLYKDDFVGALIFSGAVILLEFIPEIAIPVLGTFALVSYIAN |
| | | KVLTVQTIDNALSKRNEKWDEVYKYIVTNWLAKVNTQIDLIRKKMKEALEN |
| | | QAEATKAIINYQYNQYTEEEKNNINFNIDDLSSKLNESINKAMININKFLNQC |
| | | SVSYLMNSMIPYGVKRLEDFDASLKDALLKYIYDNRGTLIGQVDRLKDKVN |
| | | NTLSTDIPFQLSKYVDNQRLLSTFTEYIKNIINTSILNLRYESNHLIDLSRYASKI |
| | | NIGSKVNFDPIDKNQIQLFNLESSKIEVILKNAIVYNSMYENFSTSFWIRIPKY |
| | | FNSISLNNEYTIINCMENNSGWKVSLNYGEIIWTLQDTQEIKQRVVFKYSQ |
| | | MINISDYINRWIFVTITNNRLNNSKIYINGRLIDQKPISNLGNIHASNNIMFKL |
| | | DGCRDTHRYIWIKYFNLFDKELNEKEIKDLYDNQSNSGILKDFWGDYLQYD |
| | | KPYYMLNLYDPNKYVDVNNVGIRGYMYLKGPRGSVMTTNIYLNSSLYRGT |
| | | KFIIKKYASGNKDNIVRNNDRVYINVVVKNKEYRLATNASQAGVEKILSALEI |
| | | PDVGNLSQVVVMKSKNDQGITNKCKMNLQDNNGNDIGFIGFHQFNNIAK |
| | | LVASNWYNRQIERSSRTLGCSWEFIPVDDGWGERPL |
| 6 | BoNT/A1-K289R | MPFVNKQFNYKDPVNGVDIAYIKIPNAGQMQPVKAFKIHNKIWVIPERDT |
| | | FTNPEEGDLNPPPEAKQVPVSYYDSTYLSTDNEKDNYLKGVTKLFERIYSTDL |
| | | GRMLLTSIVRGIPFWGGSTIDTELKVIDTNCINVIQPDGSYRSEELNLVIIGPS |
| | | ADIIQFECKSFGHEVLNLTRNGYGSTQYIRFSPDFTFGFEESLEVDTNPLLGA |
| | | GKFATDPAVTLAHELIHAGHRLYGIAINPNRVFKVNTNAYYEMSGLEVSFEE |
| | | LRTFGGHDAKFIDSLQENEFRLYYYNRFKDIASTLNKAKSIVGTTASLQYMK |
| | | NVFKEKYLLSEDTSGKFSVDKLKFDKLYKMLTEIYTEDNFVKFFKVLNRKTYL |
| | | NFDKAVFKINIVPKVNYTIYDGFNLRNTNLAANFNGQNTEINNMNFTKLKN |
| | | FTGLFEFYKLLCVRGIITSKTKSLDKGYNKALNDLCIKVNNWDLFFSPSEDNF |
| | | TNDLNKGEEITSDTNIEAAEENISLDLIQQYYLTFNFDNEPENISIENLSSDIIG |
| | | QLELMPNIERFPNGKKYELDKYTMFHYLRAQEFEHGKSRIALTNSVNEALLN |
| | | PSRVYTFFSSDYVKKVNKATEAAMFLGWVEQLVYDFTDETSEVSTTDKIADI |
| | | TIIIPYIGPALNIGNMLYKDDFVGALIFSGAVILLEFIPEIAIPVLGTFALVSYIAN |
| | | KVLTVQTIDNALSKRNEKWDEVYKYIVTNWLAKVNTQIDLIRKKMKEALEN |
| | | QAEATKAIINYQYNQYTEEEKNNINFNIDDLSSKLNESINKAMININKFLNQC |
| | | SVSYLMNSMIPYGVKRLEDFDASLKDALLKYIYDNRGTLIGQVDRLKDKVN |
| | | NTLSTDIPFQLSKYVDNQRLLSTFTEYIKNIINTSILNLRYESNHLIDLSRYASKI |
| | | NIGSKVNFDPIDKNQIQLFNLESSKIEVILKNAIVYNSMYENFSTSFWIRIPKY |
| | | FNSISLNNEYTIINCMENNSGWKVSLNYGEIIWTLQDTQEIKQRVVFKYSQ |
| | | MINISDYINRWIFVTITNNRLNNSKIYINGRLIDQKPISNLGNIHASNNIMFKL |
| | | DGCRDTHRYIWIKYFNLFDKELNEKEIKDLYDNQSNSGILKDFWGDYLQYD |
| | | KPYYMLNLYDPNKYVDVNNVGIRGYMYLKGPRGSVMTTNIYLNSSLYRGT |
| | | KFIIKKYASGNKDNIVRNNDRVYINVVVKNKEYRLATNASQAGVEKILSALEI |
| | | PDVGNLSQVVVMKSKNDQGITNKCKMNLQDNNGNDIGFIGFHQFNNIAK |
| | | LVASNWYNRQIERSSRTLGCSWEFIPVDDGWGERPL |
| 7 | BoNT/A1-K291R | MPFVNKQFNYKDPVNGVDIAYIKIPNAGQMQPVKAFKIHNKIWVIPERDT |
| | | FTNPEEGDLNPPPEAKQVPVSYYDSTYLSTDNEKDNYLKGVTKLFERIYSTDL |
| | | GRMLLTSIVRGIPFWGGSTIDTELKVIDTNCINVIQPDGSYRSEELNLVIIGPS |
| | | ADIIQFECKSFGHEVLNLTRNGYGSTQYIRFSPDFTFGFEESLEVDTNPLLGA |
| | | GKFATDPAVTLAHELIHAGHRLYGIAINPNRVFKVNTNAYYEMSGLEVSFEE |
| | | LRTFGGHDAKFIDSLQENEFRLYYYNKFRDIASTLNKAKSIVGTTASLQYMK |
| | | NVFKEKYLLSEDTSGKFSVDKLKFDKLYKMLTEIYTEDNFVKFFKVLNRKTYL |
| | | NFDKAVFKINIVPKVNYTIYDGFNLRNTNLAANFNGQNTEINNMNFTKLKN |
| | | FTGLFEFYKLLCVRGIITSKTKSLDKGYNKALNDLCIKVNNWDLFFSPSEDNF |
| | | TNDLNKGEEITSDTNIEAAEENISLDLIQQYYLTFNFDNEPENISIENLSSDIIG |
| | | QLELMPNIERFPNGKKYELDKYTMFHYLRAQEFEHGKSRIALTNSVNEALLN |
| | | PSRVYTFFSSDYVKKVNKATEAAMFLGWVEQLVYDFTDETSEVSTTDKIADI |
| | | TIIIPYIGPALNIGNMLYKDDFVGALIFSGAVILLEFIPEIAIPVLGTFALVSYIAN |
| | | KVLTVQTIDNALSKRNEKWDEVYKYIVTNWLAKVNTQIDLIRKKMKEALEN |
| | | QAEATKAIINYQYNQYTEEEKNNINFNIDDLSSKLNESINKAMININKFLNQC |
| | | SVSYLMNSMIPYGVKRLEDFDASLKDALLKYIYDNRGTLIGQVDRLKDKVN |
| | | NTLSTDIPFQLSKYVDNQRLLSTFTEYIKNIINTSILNLRYESNHLIDLSRYASKI |
| | | NIGSKVNFDPIDKNQIQLFNLESSKIEVILKNAIVYNSMYENFSTSFWIRIPKY |
| | | FNSISLNNEYTIINCMENNSGWKVSLNYGEIIWTLQDTQEIKQRVVFKYSQ |
| | | MINISDYINRWIFVTITNNRLNNSKIYINGRLIDQKPISNLGNIHASNNIMFKL |
| | | DGCRDTHRYIWIKYFNLFDKELNEKEIKDLYDNQSNSGILKDFWGDYLQYD |
| | | KPYYMLNLYDPNKYVDVNNVGIRGYMYLKGPRGSVMTTNIYLNSSLYRGT |
| | | KFIIKKYASGNKDNIVRNNDRVYINVVVKNKEYRLATNASQAGVEKILSALEI |
| | | PDVGNLSQVVVMKSKNDQGITNKCKMNLQDNNGNDIGFIGFHQFNNIAK |
| | | LVASNWYNRQIERSSRTLGCSWEFIPVDDGWGERPL |
| 8 | BoNT/A1-K299R | MPFVNKQFNYKDPVNGVDIAYIKIPNAGQMQPVKAFKIHNKIWVIPERDT |
| | | FTNPEEGDLNPPPEAKQVPVSYYDSTYLSTDNEKDNYLKGVTKLFERIYSTDL |
| | | GRMLLTSIVRGIPFWGGSTIDTELKVIDTNCINVIQPDGSYRSEELNLVIIGPS |
| | | ADIIQFECKSFGHEVLNLTRNGYGSTQYIRFSPDFTFGFEESLEVDTNPLLGA |
| | | GKFATDPAVTLAHELIHAGHRLYGIAINPNRVFKVNTNAYYEMSGLEVSFEE |
| | | LRTFGGHDAKFIDSLQENEFRLYYYNKFKDIASTLNRAKSIVGTTASLQYMK |
| | | NVFKEKYLLSEDTSGKFSVDKLKFDKLYKMLTEIYTEDNFVKFFKVLNRKTYL |
| | | NFDKAVFKINIVPKVNYTIYDGFNLRNTNLAANFNGQNTEINNMNFTKLKN |
| | | FTGLFEFYKLLCVRGIITSKTKSLDKGYNKALNDLCIKVNNWDLFFSPSEDNF |
| | | TNDLNKGEEITSDTNIEAAEENISLDLIQQYYLTFNFDNEPENISIENLSSDIIG |
| | | QLELMPNIERFPNGKKYELDKYTMFHYLRAQEFEHGKSRIALTNSVNEALLN |
| | | PSRVYTFFSSDYVKKVNKATEAAMFLGWVEQLVYDFTDETSEVSTTDKIADI |
| | | TIIIPYIGPALNIGNMLYKDDFVGALIFSGAVILLEFIPEIAIPVLGTFALVSYIAN |
| | | KVLTVQTIDNALSKRNEKWDEVYKYIVTNWLAKVNTQIDLIRKKMKEALEN |
| | | QAEATKAIINYQYNQYTEEEKNNINFNIDDLSSKLNESINKAMININKFLNQC |
| | | SVSYLMNSMIPYGVKRLEDFDASLKDALLKYIYDNRGTLIGQVDRLKDKVN |
| | | NTLSTDIPFQLSKYVDNQRLLSTFTEYIKNIINTSILNLRYESNHLIDLSRYASKI |
| | | NIGSKVNFDPIDKNQIQLFNLESSKIEVILKNAIVYNSMYENFSTSFWIRIPKY |
| | | FNSISLNNEYTIINCMENNSGWKVSLNYGEIIWTLQDTQEIKQRVVFKYSQ |
| | | MINISDYINRWIFVTITNNRLNNSKIYINGRLIDQKPISNLGNIHASNNIMFKL |
| | | DGCRDTHRYIWIKYFNLFDKELNEKEIKDLYDNQSNSGILKDFWGDYLQYD |
| | | KPYYMLNLYDPNKYVDVNNVGIRGYMYLKGPRGSVMTTNIYLNSSLYRGT |
| | | KFIIKKYASGNKDNIVRNNDRVYINVVVKNKEYRLATNASQAGVEKILSALEI |
| | | PDVGNLSQVVVMKSKNDQGITNKCKMNLQDNNGNDIGFIGFHQFNNIAK |
| | | LVASNWYNRQIERSSRTLGCSWEFIPVDDGWGERPL |
| 9 | BoNT/A1-K318R | MPFVNKQFNYKDPVNGVDIAYIKIPNAGQMQPVKAFKIHNKIWVIPERDT |
| | | FTNPEEGDLNPPPEAKQVPVSYYDSTYLSTDNEKDNYLKGVTKLFERIYSTDL |
| | | GRMLLTSIVRGIPFWGGSTIDTELKVIDTNCINVIQPDGSYRSEELNLVIIGPS |
| | | ADIIQFECKSFGHEVLNLTRNGYGSTQYIRFSPDFTFGFEESLEVDTNPLLGA |
| | | GKFATDPAVTLAHELIHAGHRLYGIAINPNRVFKVNTNAYYEMSGLEVSFEE |
| | | LRTFGGHDAKFIDSLQENEFRLYYYNKFKDIASTLNKAKSIVGTTASLQYMK |
| | | NVFREKYLLSEDTSGKFSVDKLKFDKLYKMLTEIYTEDNFVKFFKVLNRKTYL |
| | | NFDKAVFKINIVPKVNYTIYDGFNLRNTNLAANFNGQNTEINNMNFTKLKN |
| | | FTGLFEFYKLLCVRGIITSKTKSLDKGYNKALNDLCIKVNNWDLFFSPSEDNF |
| | | TNDLNKGEEITSDTNIEAAEENISLDLIQQYYLTFNFDNEPENISIENLSSDIIG |
| | | QLELMPNIERFPNGKKYELDKYTMFHYLRAQEFEHGKSRIALTNSVNEALLN |
| | | PSRVYTFFSSDYVKKVNKATEAAMFLGWVEQLVYDFTDETSEVSTTDKIADI |
| | | TIIIPYIGPALNIGNMLYKDDFVGALIFSGAVILLEFIPEIAIPVLGTFALVSYIAN |
| | | KVLTVQTIDNALSKRNEKWDEVYKYIVTNWLAKVNTQIDLIRKKMKEALEN |
| | | QAEATKAIINYQYNQYTEEEKNNINFNIDDLSSKLNESINKAMININKFLNQC |
| | | SVSYLMNSMIPYGVKRLEDFDASLKDALLKYIYDNRGTLIGQVDRLKDKVN |
| | | NTLSTDIPFQLSKYVDNQRLLSTFTEYIKNIINTSILNLRYESNHLIDLSRYASKI |
| | | NIGSKVNFDPIDKNQIQLFNLESSKIEVILKNAIVYNSMYENFSTSFWIRIPKY |
| | | FNSISLNNEYTIINCMENNSGWKVSLNYGEIIWTLQDTQEIKQRVVFKYSQ |
| | | MINISDYINRWIFVTITNNRLNNSKIYINGRLIDQKPISNLGNIHASNNIMFKL |
| | | DGCRDTHRYIWIKYFNLFDKELNEKEIKDLYDNQSNSGILKDFWGDYLQYD |
| | | KPYYMLNLYDPNKYVDVNNVGIRGYMYLKGPRGSVMTTNIYLNSSLYRGT |
| | | KFIIKKYASGNKDNIVRNNDRVYINVVVKNKEYRLATNASQAGVEKILSALEI |
| | | PDVGNLSQVVVMKSKNDQGITNKCKMNLQDNNGNDIGFIGFHQFNNIAK |
| | | LVASNWYNRQIERSSRTLGCSWEFIPVDDGWGERPL |
| 10 | BoNT/A1-K335R | MPFVNKQFNYKDPVNGVDIAYIKIPNAGQMQPVKAFKIHNKIWVIPERDT |
| | | FTNPEEGDLNPPPEAKQVPVSYYDSTYLSTDNEKDNYLKGVTKLFERIYSTDL |
| | | GRMLLTSIVRGIPFWGGSTIDTELKVIDTNCINVIQPDGSYRSEELNLVIIGPS |
| | | ADIIQFECKSFGHEVLNLTRNGYGSTQYIRFSPDFTFGFEESLEVDTNPLLGA |
| | | GKFATDPAVTLAHELIHAGHRLYGIAINPNRVFKVNTNAYYEMSGLEVSFEE |
| | | LRTFGGHDAKFIDSLQENEFRLYYYNKFKDIASTLNKAKSIVGTTASLQYMK |
| | | NVFKEKYLLSEDTSGKFSVDRLKFDKLYKMLTEIYTEDNFVKFFKVLNRKTYL |
| | | NFDKAVFKINIVPKVNYTIYDGFNLRNTNLAANFNGQNTEINNMNFTKLKN |
| | | FTGLFEFYKLLCVRGIITSKTKSLDKGYNKALNDLCIKVNNWDLFFSPSEDNF |
| | | TNDLNKGEEITSDTNIEAAEENISLDLIQQYYLTFNFDNEPENISIENLSSDIIG |
| | | QLELMPNIERFPNGKKYELDKYTMFHYLRAQEFEHGKSRIALTNSVNEALLN |
| | | PSRVYTFFSSDYVKKVNKATEAAMFLGWVEQLVYDFTDETSEVSTTDKIADI |
| | | TIIIPYIGPALNIGNMLYKDDFVGALIFSGAVILLEFIPEIAIPVLGTFALVSYIAN |
| | | KVLTVQTIDNALSKRNEKWDEVYKYIVTNWLAKVNTQIDLIRKKMKEALEN |
| | | QAEATKAIINYQYNQYTEEEKNNINFNIDDLSSKLNESINKAMININKFLNQC |
| | | SVSYLMNSMIPYGVKRLEDFDASLKDALLKYIYDNRGTLIGQVDRLKDKVN |
| | | NTLSTDIPFQLSKYVDNQRLLSTFTEYIKNIINTSILNLRYESNHLIDLSRYASKI |
| | | NIGSKVNFDPIDKNQIQLFNLESSKIEVILKNAIVYNSMYENFSTSFWIRIPKY |
| | | FNSISLNNEYTIINCMENNSGWKVSLNYGEIIWTLQDTQEIKQRVVFKYSQ |
| | | MINISDYINRWIFVTITNNRLNNSKIYINGRLIDQKPISNLGNIHASNNIMFKL |
| | | DGCRDTHRYIWIKYFNLFDKELNEKEIKDLYDNQSNSGILKDFWGDYLQYD |
| | | KPYYMLNLYDPNKYVDVNNVGIRGYMYLKGPRGSVMTTNIYLNSSLYRGT |
| | | KFIIKKYASGNKDNIVRNNDRVYINVVVKNKEYRLATNASQAGVEKILSALEI |
| | | PDVGNLSQVVVMKSKNDQGITNKCKMNLQDNNGNDIGFIGFHQFNNIAK |
| | | LVASNWYNRQIERSSRTLGCSWEFIPVDDGWGERPL |
| | | MPFVNKQFNYKDPVNGVDIAYIKIPNAGQMQPVKAFKIHNKIWVIPERDT |
| 11 | BoNT/A1-K337R | FTNPEEGDLNPPPEAKQVPVSYYDSTYLSTDNEKDNYLKGVTKLFERIYSTDL |
| | | GRMLLTSIVRGIPFWGGSTIDTELKVIDTNCINVIQPDGSYRSEELNLVIIGPS |
| | | ADIIQFECKSFGHEVLNLTRNGYGSTQYIRFSPDFTFGFEESLEVDTNPLLGA |
| | | GKFATDPAVTLAHELIHAGHRLYGIAINPNRVFKVNTNAYYEMSGLEVSFEE |
| | | LRTFGGHDAKFIDSLQENEFRLYYYNKFKDIASTLNKAKSIVGTTASLQYMK |
| | | NVFKEKYLLSEDTSGKFSVDKLRFDKLYKMLTEIYTEDNFVKFFKVLNRKTYL |
| | | NFDKAVFKINIVPKVNYTIYDGFNLRNTNLAANFNGQNTEINNMNFTKLKN |
| | | FTGLFEFYKLLCVRGIITSKTKSLDKGYNKALNDLCIKVNNWDLFFSPSEDNF |
| | | TNDLNKGEEITSDTNIEAAEENISLDLIQQYYLTFNFDNEPENISIENLSSDIIG |
| | | QLELMPNIERFPNGKKYELDKYTMFHYLRAQEFEHGKSRIALTNSVNEALLN |
| | | PSRVYTFFSSDYVKKVNKATEAAMFLGWVEQLVYDFTDETSEVSTTDKIADI |
| | | TIIIPYIGPALNIGNMLYKDDFVGALIFSGAVILLEFIPEIAIPVLGTFALVSYIAN |
| | | KVLTVQTIDNALSKRNEKWDEVYKYIVTNWLAKVNTQIDLIRKKMKEALEN |
| | | QAEATKAIINYQYNQYTEEEKNNINFNIDDLSSKLNESINKAMININKFLNQC |
| | | SVSYLMNSMIPYGVKRLEDFDASLKDALLKYIYDNRGTLIGQVDRLKDKVN |
| | | NTLSTDIPFQLSKYVDNQRLLSTFTEYIKNIINTSILNLRYESNHLIDLSRYASKI |
| | | NIGSKVNFDPIDKNQIQLFNLESSKIEVILKNAIVYNSMYENFSTSFWIRIPKY |
| | | FNSISLNNEYTIINCMENNSGWKVSLNYGEIIWTLQDTQEIKQRVVFKYSQ |
| | | MINISDYINRWIFVTITNNRLNNSKIYINGRLIDQKPISNLGNIHASNNIMFKL |
| | | DGCRDTHRYIWIKYFNLFDKELNEKEIKDLYDNQSNSGILKDFWGDYLQYD |
| | | KPYYMLNLYDPNKYVDVNNVGIRGYMYLKGPRGSVMTTNIYLNSSLYRGT |
| | | KFIIKKYASGNKDNIVRNNDRVYINVVVKNKEYRLATNASQAGVEKILSALEI |
| | | PDVGNLSQVVVMKSKNDQGITNKCKMNLQDNNGNDIGFIGFHQFNNIAK |
| | | LVASNWYNRQIERSSRTLGCSWEFIPVDDGWGERPL |
| 12 | BoNT/A1-K340R | MPFVNKQFNYKDPVNGVDIAYIKIPNAGQMQPVKAFKIHNKIWVIPERDT |
| | | FTNPEEGDLNPPPEAKQVPVSYYDSTYLSTDNEKDNYLKGVTKLFERIYSTDL |
| | | GRMLLTSIVRGIPFWGGSTIDTELKVIDTNCINVIQPDGSYRSEELNLVIIGPS |
| | | ADIIQFECKSFGHEVLNLTRNGYGSTQYIRFSPDFTFGFEESLEVDTNPLLGA |
| | | GKFATDPAVTLAHELIHAGHRLYGIAINPNRVFKVNTNAYYEMSGLEVSFEE |
| | | LRTFGGHDAKFIDSLQENEFRLYYYNKFKDIASTLNKAKSIVGTTASLQYMK |
| | | NVFKEKYLLSEDTSGKFSVDKLKFDRLYKMLTEIYTEDNFVKFFKVLNRKTYL |
| | | NFDKAVFKINIVPKVNYTIYDGFNLRNTNLAANFNGQNTEINNMNFTKLKN |
| | | FTGLFEFYKLLCVRGIITSKTKSLDKGYNKALNDLCIKVNNWDLFFSPSEDNF |
| | | TNDLNKGEEITSDTNIEAAEENISLDLIQQYYLTFNFDNEPENISIENLSSDIIG |
| | | QLELMPNIERFPNGKKYELDKYTMFHYLRAQEFEHGKSRIALTNSVNEALLN |
| | | PSRVYTFFSSDYVKKVNKATEAAMFLGWVEQLVYDFTDETSEVSTTDKIADI |
| | | TIIIPYIGPALNIGNMLYKDDFVGALIFSGAVILLEFIPEIAIPVLGTFALVSYIAN |
| | | KVLTVQTIDNALSKRNEKWDEVYKYIVTNWLAKVNTQIDLIRKKMKEALEN |
| | | QAEATKAIINYQYNQYTEEEKNNINFNIDDLSSKLNESINKAMININKFLNQC |
| | | SVSYLMNSMIPYGVKRLEDFDASLKDALLKYIYDNRGTLIGQVDRLKDKVN |
| | | NTLSTDIPFQLSKYVDNQRLLSTFTEYIKNIINTSILNLRYESNHLIDLSRYASKI |
| | | NIGSKVNFDPIDKNQIQLFNLESSKIEVILKNAIVYNSMYENFSTSFWIRIPKY |
| | | FNSISLNNEYTIINCMENNSGWKVSLNYGEIIWTLQDTQEIKQRVVFKYSQ |
| | | MINISDYINRWIFVTITNNRLNNSKIYINGRLIDQKPISNLGNIHASNNIMFKL |
| | | DGCRDTHRYIWIKYFNLFDKELNEKEIKDLYDNQSNSGILKDFWGDYLQYD |
| | | KPYYMLNLYDPNKYVDVNNVGIRGYMYLKGPRGSVMTTNIYLNSSLYRGT |
| | | KFIIKKYASGNKDNIVRNNDRVYINVVVKNKEYRLATNASQAGVEKILSALEI |
| | | PDVGNLSQVVVMKSKNDQGITNKCKMNLQDNNGNDIGFIGFHQFNNIAK |
| | | LVASNWYNRQIERSSRTLGCSWEFIPVDDGWGERPL |
| 13 | BoNT/A1-K343R | MPFVNKQFNYKDPVNGVDIAYIKIPNAGQMQPVKAFKIHNKIWVIPERDT |
| | | FTNPEEGDLNPPPEAKQVPVSYYDSTYLSTDNEKDNYLKGVTKLFERIYSTDL |
| | | GRMLLTSIVRGIPFWGGSTIDTELKVIDTNCINVIQPDGSYRSEELNLVIIGPS |
| | | ADIIQFECKSFGHEVLNLTRNGYGSTQYIRFSPDFTFGFEESLEVDTNPLLGA |
| | | GKFATDPAVTLAHELIHAGHRLYGIAINPNRVFKVNTNAYYEMSGLEVSFEE |
| | | LRTFGGHDAKFIDSLQENEFRLYYYNKFKDIASTLNKAKSIVGTTASLQYMK |
| | | NVFKEKYLLSEDTSGKFSVDKLKFDKLYRMLTEIYTEDNFVKFFKVLNRKTYL |
| | | NFDKAVFKINIVPKVNYTIYDGFNLRNTNLAANFNGQNTEINNMNFTKLKN |
| | | FTGLFEFYKLLCVRGIITSKTKSLDKGYNKALNDLCIKVNNWDLFFSPSEDNF |
| | | TNDLNKGEEITSDTNIEAAEENISLDLIQQYYLTFNFDNEPENISIENLSSDIIG |
| | | QLELMPNIERFPNGKKYELDKYTMFHYLRAQEFEHGKSRIALTNSVNEALLN |
| | | PSRVYTFFSSDYVKKVNKATEAAMFLGWVEQLVYDFTDETSEVSTTDKIADI |
| | | TIIIPYIGPALNIGNMLYKDDFVGALIFSGAVILLEFIPEIAIPVLGTFALVSYIAN |
| | | KVLTVQTIDNALSKRNEKWDEVYKYIVTNWLAKVNTQIDLIRKKMKEALEN |
| | | QAEATKAIINYQYNQYTEEEKNNINFNIDDLSSKLNESINKAMININKFLNQC |
| | | SVSYLMNSMIPYGVKRLEDFDASLKDALLKYIYDNRGTLIGQVDRLKDKVN |
| | | NTLSTDIPFQLSKYVDNQRLLSTFTEYIKNIINTSILNLRYESNHLIDLSRYASKI |
| | | NIGSKVNFDPIDKNQIQLFNLESSKIEVILKNAIVYNSMYENFSTSFWIRIPKY |
| | | FNSISLNNEYTIINCMENNSGWKVSLNYGEIIWTLQDTQEIKQRVVFKYSQ |
| | | MINISDYINRWIFVTITNNRLNNSKIYINGRLIDQKPISNLGNIHASNNIMFKL |
| | | DGCRDTHRYIWIKYFNLFDKELNEKEIKDLYDNQSNSGILKDFWGDYLQYD |
| | | KPYYMLNLYDPNKYVDVNNVGIRGYMYLKGPRGSVMTTNIYLNSSLYRGT |
| | | KFIIKKYASGNKDNIVRNNDRVYINVVVKNKEYRLATNASQAGVEKILSALEI |
| | | PDVGNLSQVVVMKSKNDQGITNKCKMNLQDNNGNDIGFIGFHQFNNIAK |
| | | LVASNWYNRQIERSSRTLGCSWEFIPVDDGWGERPL |
| 14 | BoNT/A1-K356R | MPFVNKQFNYKDPVNGVDIAYIKIPNAGQMQPVKAFKIHNKIWVIPERDT |
| | | FTNPEEGDLNPPPEAKQVPVSYYDSTYLSTDNEKDNYLKGVTKLFERIYSTDL |
| | | GRMLLTSIVRGIPFWGGSTIDTELKVIDTNCINVIQPDGSYRSEELNLVIIGPS |
| | | ADIIQFECKSFGHEVLNLTRNGYGSTQYIRFSPDFTFGFEESLEVDTNPLLGA |
| | | GKFATDPAVTLAHELIHAGHRLYGIAINPNRVFKVNTNAYYEMSGLEVSFEE |
| | | LRTFGGHDAKFIDSLQENEFRLYYYNKFKDIASTLNKAKSIVGTTASLQYMK |
| | | NVFKEKYLLSEDTSGKFSVDKLKFDKLYKMLTEIYTEDNFVRFFKVLNRKTYL |
| | | NFDKAVFKINIVPKVNYTIYDGFNLRNTNLAANFNGQNTEINNMNFTKLKN |
| | | FTGLFEFYKLLCVRGIITSKTKSLDKGYNKALNDLCIKVNNWDLFFSPSEDNF |
| | | TNDLNKGEEITSDTNIEAAEENISLDLIQQYYLTFNFDNEPENISIENLSSDIIG |
| | | QLELMPNIERFPNGKKYELDKYTMFHYLRAQEFEHGKSRIALTNSVNEALLN |
| | | PSRVYTFFSSDYVKKVNKATEAAMFLGWVEQLVYDFTDETSEVSTTDKIADI |
| | | TIIIPYIGPALNIGNMLYKDDFVGALIFSGAVILLEFIPEIAIPVLGTFALVSYIAN |
| | | KVLTVQTIDNALSKRNEKWDEVYKYIVTNWLAKVNTQIDLIRKKMKEALEN |
| | | QAEATKAIINYQYNQYTEEEKNNINFNIDDLSSKLNESINKAMININKFLNQC |
| | | SVSYLMNSMIPYGVKRLEDFDASLKDALLKYIYDNRGTLIGQVDRLKDKVN |
| | | NTLSTDIPFQLSKYVDNQRLLSTFTEYIKNIINTSILNLRYESNHLIDLSRYASKI |
| | | NIGSKVNFDPIDKNQIQLFNLESSKIEVILKNAIVYNSMYENFSTSFWIRIPKY |
| | | FNSISLNNEYTIINCMENNSGWKVSLNYGEIIWTLQDTQEIKQRVVFKYSQ |
| | | MINISDYINRWIFVTITNNRLNNSKIYINGRLIDQKPISNLGNIHASNNIMFKL |
| | | DGCRDTHRYIWIKYFNLFDKELNEKEIKDLYDNQSNSGILKDFWGDYLQYD |
| | | KPYYMLNLYDPNKYVDVNNVGIRGYMYLKGPRGSVMTTNIYLNSSLYRGT |
| | | KFIIKKYASGNKDNIVRNNDRVYINVVVKNKEYRLATNASQAGVEKILSALEI |
| | | PDVGNLSQVVVMKSKNDQGITNKCKMNLQDNNGNDIGFIGFHQFNNIAK |
| | | LVASNWYNRQIERSSRTLGCSWEFIPVDDGWGERPL |
| 15 | BoNT/A1-K375R | MPFVNKQFNYKDPVNGVDIAYIKIPNAGQMQPVKAFKIHNKIWVIPERDT |
| | | FTNPEEGDLNPPPEAKQVPVSYYDSTYLSTDNEKDNYLKGVTKLFERIYSTDL |
| | | GRMLLTSIVRGIPFWGGSTIDTELKVIDTNCINVIQPDGSYRSEELNLVIIGPS |
| | | ADIIQFECKSFGHEVLNLTRNGYGSTQYIRFSPDFTFGFEESLEVDTNPLLGA |
| | | GKFATDPAVTLAHELIHAGHRLYGIAINPNRVFKVNTNAYYEMSGLEVSFEE |
| | | LRTFGGHDAKFIDSLQENEFRLYYYNKFKDIASTLNKAKSIVGTTASLQYMK |
| | | NVFKEKYLLSEDTSGKFSVDKLKFDKLYKMLTEIYTEDNFVKFFKVLNRKTYL |
| | | NFDKAVFRINIVPKVNYTIYDGFNLRNTNLAANFNGQNTEINNMNFTKLKN |
| | | FTGLFEFYKLLCVRGIITSKTKSLDKGYNKALNDLCIKVNNWDLFFSPSEDNF |
| | | TNDLNKGEEITSDTNIEAAEENISLDLIQQYYLTFNFDNEPENISIENLSSDIIG |
| | | QLELMPNIERFPNGKKYELDKYTMFHYLRAQEFEHGKSRIALTNSVNEALLN |
| | | PSRVYTFFSSDYVKKVNKATEAAMFLGWVEQLVYDFTDETSEVSTTDKIADI |
| | | TIIIPYIGPALNIGNMLYKDDFVGALIFSGAVILLEFIPEIAIPVLGTFALVSYIAN |
| | | KVLTVQTIDNALSKRNEKWDEVYKYIVTNWLAKVNTQIDLIRKKMKEALEN |
| | | QAEATKAIINYQYNQYTEEEKNNINFNIDDLSSKLNESINKAMININKFLNQC |
| | | SVSYLMNSMIPYGVKRLEDFDASLKDALLKYIYDNRGTLIGQVDRLKDKVN |
| | | NTLSTDIPFQLSKYVDNQRLLSTFTEYIKNIINTSILNLRYESNHLIDLSRYASKI |
| | | NIGSKVNFDPIDKNQIQLFNLESSKIEVILKNAIVYNSMYENFSTSFWIRIPKY |
| | | FNSISLNNEYTIINCMENNSGWKVSLNYGEIIWTLQDTQEIKQRVVFKYSQ |
| | | MINISDYINRWIFVTITNNRLNNSKIYINGRLIDQKPISNLGNIHASNNIMFKL |
| | | DGCRDTHRYIWIKYFNLFDKELNEKEIKDLYDNQSNSGILKDFWGDYLQYD |
| | | KPYYMLNLYDPNKYVDVNNVGIRGYMYLKGPRGSVMTTNIYLNSSLYRGT |
| | | KFIIKKYASGNKDNIVRNNDRVYINVVVKNKEYRLATNASQAGVEKILSALEI |
| | | PDVGNLSQVVVMKSKNDQGITNKCKMNLQDNNGNDIGFIGFHQFNNIAK |
| | | LVASNWYNRQIERSSRTLGCSWEFIPVDDGWGERPL |
| 16 | BoNT/A1-K381R | MPFVNKQFNYKDPVNGVDIAYIKIPNAGQMQPVKAFKIHNKIWVIPERDT |
| | | FTNPEEGDLNPPPEAKQVPVSYYDSTYLSTDNEKDNYLKGVTKLFERIYSTDL |
| | | GRMLLTSIVRGIPFWGGSTIDTELKVIDTNCINVIQPDGSYRSEELNLVIIGPS |
| | | ADIIQFECKSFGHEVLNLTRNGYGSTQYIRFSPDFTFGFEESLEVDTNPLLGA |
| | | GKFATDPAVTLAHELIHAGHRLYGIAINPNRVFKVNTNAYYEMSGLEVSFEE |
| | | LRTFGGHDAKFIDSLQENEFRLYYYNKFKDIASTLNKAKSIVGTTASLQYMK |
| | | NVFKEKYLLSEDTSGKFSVDKLKFDKLYKMLTEIYTEDNFVKFFKVLNRKTYL |
| | | NFDKAVFKINIVPRVNYTIYDGFNLRNTNLAANFNGQNTEINNMNFTKLKN |
| | | FTGLFEFYKLLCVRGIITSKTKSLDKGYNKALNDLCIKVNNWDLFFSPSEDNF |
| | | TNDLNKGEEITSDTNIEAAEENISLDLIQQYYLTFNFDNEPENISIENLSSDIIG |
| | | QLELMPNIERFPNGKKYELDKYTMFHYLRAQEFEHGKSRIALTNSVNEALLN |
| | | PSRVYTFFSSDYVKKVNKATEAAMFLGWVEQLVYDFTDETSEVSTTDKIADI |
| | | TIIIPYIGPALNIGNMLYKDDFVGALIFSGAVILLEFIPEIAIPVLGTFALVSYIAN |
| | | KVLTVQTIDNALSKRNEKWDEVYKYIVTNWLAKVNTQIDLIRKKMKEALEN |
| | | QAEATKAIINYQYNQYTEEEKNNINFNIDDLSSKLNESINKAMININKFLNQC |
| | | SVSYLMNSMIPYGVKRLEDFDASLKDALLKYIYDNRGTLIGQVDRLKDKVN |
| | | NTLSTDIPFQLSKYVDNQRLLSTFTEYIKNIINTSILNLRYESNHLIDLSRYASKI |
| | | NIGSKVNFDPIDKNQIQLFNLESSKIEVILKNAIVYNSMYENFSTSFWIRIPKY |
| | | FNSISLNNEYTIINCMENNSGWKVSLNYGEIIWTLQDTQEIKQRVVFKYSQ |
| | | MINISDYINRWIFVTITNNRLNNSKIYINGRLIDQKPISNLGNIHASNNIMFKL |
| | | DGCRDTHRYIWIKYFNLFDKELNEKEIKDLYDNQSNSGILKDFWGDYLQYD |
| | | KPYYMLNLYDPNKYVDVNNVGIRGYMYLKGPRGSVMTTNIYLNSSLYRGT |
| | | KFIIKKYASGNKDNIVRNNDRVYINVVVKNKEYRLATNASQAGVEKILSALEI |
| | | PDVGNLSQVVVMKSKNDQGITNKCKMNLQDNNGNDIGFIGFHQFNNIAK |
| | | LVASNWYNRQIERSSRTLGCSWEFIPVDDGWGERPL |
| 17 | BoNT/A1-Y387R | MPFVNKQFNYKDPVNGVDIAYIKIPNAGQMQPVKAFKIHNKIWVIPERDT |
| | | FTNPEEGDLNPPPEAKQVPVSYYDSTYLSTDNEKDNYLKGVTKLFERIYSTDL |
| | | GRMLLTSIVRGIPFWGGSTIDTELKVIDTNCINVIQPDGSYRSEELNLVIIGPS |
| | | ADIIQFECKSFGHEVLNLTRNGYGSTQYIRFSPDFTFGFEESLEVDTNPLLGA |
| | | GKFATDPAVTLAHELIHAGHRLYGIAINPNRVFKVNTNAYYEMSGLEVSFEE |
| | | LRTFGGHDAKFIDSLQENEFRLYYYNKFKDIASTLNKAKSIVGTTASLQYMK |
| | | NVFKEKYLLSEDTSGKFSVDKLKFDKLYKMLTEIYTEDNFVKFFKVLNRKTYL |
| | | NFDKAVFKINIVPKVNYTIRDGFNLRNTNLAANFNGQNTEINNMNFTKLKN |
| | | FTGLFEFYKLLCVRGIITSKTKSLDKGYNKALNDLCIKVNNWDLFFSPSEDNF |
| | | TNDLNKGEEITSDTNIEAAEENISLDLIQQYYLTFNFDNEPENISIENLSSDIIG |
| | | QLELMPNIERFPNGKKYELDKYTMFHYLRAQEFEHGKSRIALTNSVNEALLN |
| | | PSRVYTFFSSDYVKKVNKATEAAMFLGWVEQLVYDFTDETSEVSTTDKIADI |
| | | TIIIPYIGPALNIGNMLYKDDFVGALIFSGAVILLEFIPEIAIPVLGTFALVSYIAN |
| | | KVLTVQTIDNALSKRNEKWDEVYKYIVTNWLAKVNTQIDLIRKKMKEALEN |
| | | QAEATKAIINYQYNQYTEEEKNNINFNIDDLSSKLNESINKAMININKFLNQC |
| | | SVSYLMNSMIPYGVKRLEDFDASLKDALLKYIYDNRGTLIGQVDRLKDKVN |
| | | NTLSTDIPFQLSKYVDNQRLLSTFTEYIKNIINTSILNLRYESNHLIDLSRYASKI |
| | | NIGSKVNFDPIDKNQIQLFNLESSKIEVILKNAIVYNSMYENFSTSFWIRIPKY |
| | | FNSISLNNEYTIINCMENNSGWKVSLNYGEIIWTLQDTQEIKQRVVFKYSQ |
| | | MINISDYINRWIFVTITNNRLNNSKIYINGRLIDQKPISNLGNIHASNNIMFKL |
| | | DGCRDTHRYIWIKYFNLFDKELNEKEIKDLYDNQSNSGILKDFWGDYLQYD |
| | | KPYYMLNLYDPNKYVDVNNVGIRGYMYLKGPRGSVMTTNIYLNSSLYRGT |
| | | KFIIKKYASGNKDNIVRNNDRVYINVVVKNKEYRLATNASQAGVEKILSALEI |
| | | PDVGNLSQVVVMKSKNDQGITNKCKMNLQDNNGNDIGFIGFHQFNNIAK |
| | | LVASNWYNRQIERSSRTLGCSWEFIPVDDGWGERPL |
| 18 | BoNT/A1-M411R | MPFVNKQFNYKDPVNGVDIAYIKIPNAGQMQPVKAFKIHNKIWVIPERDT |
| | | FTNPEEGDLNPPPEAKQVPVSYYDSTYLSTDNEKDNYLKGVTKLFERIYSTDL |
| | | GRMLLTSIVRGIPFWGGSTIDTELKVIDTNCINVIQPDGSYRSEELNLVIIGPS |
| | | ADIIQFECKSFGHEVLNLTRNGYGSTQYIRFSPDFTFGFEESLEVDTNPLLGA |
| | | GKFATDPAVTLAHELIHAGHRLYGIAINPNRVFKVNTNAYYEMSGLEVSFEE |
| | | LRTFGGHDAKFIDSLQENEFRLYYYNKFKDIASTLNKAKSIVGTTASLQYMK |
| | | NVFKEKYLLSEDTSGKFSVDKLKFDKLYKMLTEIYTEDNFVKFFKVLNRKTYL |
| | | NFDKAVFKINIVPKVNYTIYDGFNLRNTNLAANFNGQNTEINNRNFTKLKN |
| | | FTGLFEFYKLLCVRGIITSKTKSLDKGYNKALNDLCIKVNNWDLFFSPSEDNF |
| | | TNDLNKGEEITSDTNIEAAEENISLDLIQQYYLTFNFDNEPENISIENLSSDIIG |
| | | QLELMPNIERFPNGKKYELDKYTMFHYLRAQEFEHGKSRIALTNSVNEALLN |
| | | PSRVYTFFSSDYVKKVNKATEAAMFLGWVEQLVYDFTDETSEVSTTDKIADI |
| | | TIIIPYIGPALNIGNMLYKDDFVGALIFSGAVILLEFIPEIAIPVLGTFALVSYIAN |
| | | KVLTVQTIDNALSKRNEKWDEVYKYIVTNWLAKVNTQIDLIRKKMKEALEN |
| | | QAEATKAIINYQYNQYTEEEKNNINFNIDDLSSKLNESINKAMININKFLNQC |
| | | SVSYLMNSMIPYGVKRLEDFDASLKDALLKYIYDNRGTLIGQVDRLKDKVN |
| | | NTLSTDIPFQLSKYVDNQRLLSTFTEYIKNIINTSILNLRYESNHLIDLSRYASKI |
| | | NIGSKVNFDPIDKNQIQLFNLESSKIEVILKNAIVYNSMYENFSTSFWIRIPKY |
| | | FNSISLNNEYTIINCMENNSGWKVSLNYGEIIWTLQDTQEIKQRVVFKYSQ |
| | | MINISDYINRWIFVTITNNRLNNSKIYINGRLIDQKPISNLGNIHASNNIMFKL |
| | | DGCRDTHRYIWIKYFNLFDKELNEKEIKDLYDNQSNSGILKDFWGDYLQYD |
| | | KPYYMLNLYDPNKYVDVNNVGIRGYMYLKGPRGSVMTTNIYLNSSLYRGT |
| | | KFIIKKYASGNKDNIVRNNDRVYINVVVKNKEYRLATNASQAGVEKILSALEI |
| | | PDVGNLSQVVVMKSKNDQGITNKCKMNLQDNNGNDIGFIGFHQFNNIAK |
| | | LVASNWYNRQIERSSRTLGCSWEFIPVDDGWGERPL |
| 19 | BoNT/A1-K415R | MPFVNKQFNYKDPVNGVDIAYIKIPNAGQMQPVKAFKIHNKIWVIPERDT |
| | | FTNPEEGDLNPPPEAKQVPVSYYDSTYLSTDNEKDNYLKGVTKLFERIYSTDL |
| | | GRMLLTSIVRGIPFWGGSTIDTELKVIDTNCINVIQPDGSYRSEELNLVIIGPS |
| | | ADIIQFECKSFGHEVLNLTRNGYGSTQYIRFSPDFTFGFEESLEVDTNPLLGA |
| | | GKFATDPAVTLAHELIHAGHRLYGIAINPNRVFKVNTNAYYEMSGLEVSFEE |
| | | LRTFGGHDAKFIDSLQENEFRLYYYNKFKDIASTLNKAKSIVGTTASLQYMK |
| | | NVFKEKYLLSEDTSGKFSVDKLKFDKLYKMLTEIYTEDNFVKFFKVLNRKTYL |
| | | NFDKAVFKINIVPKVNYTIYDGFNLRNTNLAANFNGQNTEINNMNFTRLKN |
| | | FTGLFEFYKLLCVRGIITSKTKSLDKGYNKALNDLCIKVNNWDLFFSPSEDNF |
| | | TNDLNKGEEITSDTNIEAAEENISLDLIQQYYLTFNFDNEPENISIENLSSDIIG |
| | | QLELMPNIERFPNGKKYELDKYTMFHYLRAQEFEHGKSRIALTNSVNEALLN |
| | | PSRVYTFFSSDYVKKVNKATEAAMFLGWVEQLVYDFTDETSEVSTTDKIADI |
| | | TIIIPYIGPALNIGNMLYKDDFVGALIFSGAVILLEFIPEIAIPVLGTFALVSYIAN |
| | | KVLTVQTIDNALSKRNEKWDEVYKYIVTNWLAKVNTQIDLIRKKMKEALEN |
| | | QAEATKAIINYQYNQYTEEEKNNINFNIDDLSSKLNESINKAMININKFLNQC |
| | | SVSYLMNSMIPYGVKRLEDFDASLKDALLKYIYDNRGTLIGQVDRLKDKVN |
| | | NTLSTDIPFQLSKYVDNQRLLSTFTEYIKNIINTSILNLRYESNHLIDLSRYASKI |
| | | NIGSKVNFDPIDKNQIQLFNLESSKIEVILKNAIVYNSMYENFSTSFWIRIPKY |
| | | FNSISLNNEYTIINCMENNSGWKVSLNYGEIIWTLQDTQEIKQRVVFKYSQ |
| | | MINISDYINRWIFVTITNNRLNNSKIYINGRLIDQKPISNLGNIHASNNIMFKL |
| | | DGCRDTHRYIWIKYFNLFDKELNEKEIKDLYDNQSNSGILKDFWGDYLQYD |
| | | KPYYMLNLYDPNKYVDVNNVGIRGYMYLKGPRGSVMTTNIYLNSSLYRGT |
| | | KFIIKKYASGNKDNIVRNNDRVYINVVVKNKEYRLATNASQAGVEKILSALEI |
| | | PDVGNLSQVVVMKSKNDQGITNKCKMNLQDNNGNDIGFIGFHQFNNIAK |
| | | LVASNWYNRQIERSSRTLGCSWEFIPVDDGWGERPL |
| 20 | BoNT/A1-Group 0 | MPFVNKQFNYRDPVNGVDIAYIKIPNAGQMQPVKAFKIHNKIWVIPERDT |
| | (K11R, K335R, K337R, | FTNPEEGDLNPPPEAKQVPVSYYDSTYLSTDNEKDNYLKGVTKLFERIYSTDL |
| | K343R, K375R, K415R) | GRMLLTSIVRGIPFWGGSTIDTELKVIDTNCINVIQPDGSYRSEELNLVIIGPS |
| | | ADIIQFECKSFGHEVLNLTRNGYGSTQYIRFSPDFTFGFEESLEVDTNPLLGA |
| | | GKFATDPAVTLAHELIHAGHRLYGIAINPNRVFKVNTNAYYEMSGLEVSFEE |
| | | LRTFGGHDAKFIDSLQENEFRLYYYNKFKDIASTLNKAKSIVGTTASLQYMK |
| | | NVFKEKYLLSEDTSGKFSVDRLRFDKLYRMLTEIYTEDNFVKFFKVLNRKTYL |
| | | NFDKAVFRINIVPKVNYTIYDGFNLRNTNLAANFNGQNTEINNMNFTRLKN |
| | | FTGLFEFYKLLCVRGIITSKTKSLDKGYNKALNDLCIKVNNWDLFFSPSEDNF |
| | | TNDLNKGEEITSDTNIEAAEENISLDLIQQYYLTFNFDNEPENISIENLSSDIIG |
| | | QLELMPNIERFPNGKKYELDKYTMFHYLRAQEFEHGKSRIALTNSVNEALLN |
| | | PSRVYTFFSSDYVKKVNKATEAAMFLGWVEQLVYDFTDETSEVSTTDKIADI |
| | | TIIIPYIGPALNIGNMLYKDDFVGALIFSGAVILLEFIPEIAIPVLGTFALVSYIAN |
| | | KVLTVQTIDNALSKRNEKWDEVYKYIVTNWLAKVNTQIDLIRKKMKEALEN |
| | | QAEATKAIINYQYNQYTEEEKNNINFNIDDLSSKLNESINKAMININKFLNQC |
| | | SVSYLMNSMIPYGVKRLEDFDASLKDALLKYIYDNRGTLIGQVDRLKDKVN |
| | | NTLSTDIPFQLSKYVDNQRLLSTFTEYIKNIINTSILNLRYESNHLIDLSRYASKI |
| | | NIGSKVNFDPIDKNQIQLFNLESSKIEVILKNAIVYNSMYENFSTSFWIRIPKY |
| | | FNSISLNNEYTIINCMENNSGWKVSLNYGEIIWTLQDTQEIKQRVVFKYSQ |
| | | MINISDYINRWIFVTITNNRLNNSKIYINGRLIDQKPISNLGNIHASNNIMFKL |
| | | DGCRDTHRYIWIKYFNLFDKELNEKEIKDLYDNQSNSGILKDFWGDYLQYD |
| | | KPYYMLNLYDPNKYVDVNNVGIRGYMYLKGPRGSVMTTNIYLNSSLYRGT |
| | | KFIIKKYASGNKDNIVRNNDRVYINVVVKNKEYRLATNASQAGVEKILSALEI |
| | | PDVGNLSQVVVMKSKNDQGITNKCKMNLQDNNGNDIGFIGFHQFNNIAK |
| | | LVASNWYNRQIERSSRTLGCSWEFIPVDDGWGERPL |
| 21 | BoNT/A1-Group 1 | MPFVNKQFNYKDPVNGVDIAYIKIPNAGQMQPVKAFKIHNRIWVIPERDT |
| | (K41R, K318R, K340R) | FTNPEEGDLNPPPEAKQVPVSYYDSTYLSTDNEKDNYLKGVTKLFERIYSTDL |
| | | GRMLLTSIVRGIPFWGGSTIDTELKVIDTNCINVIQPDGSYRSEELNLVIIGPS |
| | | ADIIQFECKSFGHEVLNLTRNGYGSTQYIRFSPDFTFGFEESLEVDTNPLLGA |
| | | GKFATDPAVTLAHELIHAGHRLYGIAINPNRVFKVNTNAYYEMSGLEVSFEE |
| | | LRTFGGHDAKFIDSLQENEFRLYYYNKFKDIASTLNKAKSIVGTTASLQYMK |
| | | NVFREKYLLSEDTSGKFSVDKLKFDRLYKMLTEIYTEDNFVKFFKVLNRKTYL |
| | | NFDKAVFKINIVPKVNYTIYDGFNLRNTNLAANFNGQNTEINNMNFTKLKN |
| | | FTGLFEFYKLLCVRGIITSKTKSLDKGYNKALNDLCIKVNNWDLFFSPSEDNF |
| | | TNDLNKGEEITSDTNIEAAEENISLDLIQQYYLTFNFDNEPENISIENLSSDIIG |
| | | QLELMPNIERFPNGKKYELDKYTMFHYLRAQEFEHGKSRIALTNSVNEALLN |
| | | PSRVYTFFSSDYVKKVNKATEAAMFLGWVEQLVYDFTDETSEVSTTDKIADI |
| | | TIIIPYIGPALNIGNMLYKDDFVGALIFSGAVILLEFIPEIAIPVLGTFALVSYIAN |
| | | KVLTVQTIDNALSKRNEKWDEVYKYIVTNWLAKVNTQIDLIRKKMKEALEN |
| | | QAEATKAIINYQYNQYTEEEKNNINFNIDDLSSKLNESINKAMININKFLNQC |
| | | SVSYLMNSMIPYGVKRLEDFDASLKDALLKYIYDNRGTLIGQVDRLKDKVN |
| | | NTLSTDIPFQLSKYVDNQRLLSTFTEYIKNIINTSILNLRYESNHLIDLSRYASKI |
| | | NIGSKVNFDPIDKNQIQLFNLESSKIEVILKNAIVYNSMYENFSTSFWIRIPKY |
| | | FNSISLNNEYTIINCMENNSGWKVSLNYGEIIWTLQDTQEIKQRVVFKYSQ |
| | | MINISDYINRWIFVTITNNRLNNSKIYINGRLIDQKPISNLGNIHASNNIMFKL |
| | | DGCRDTHRYIWIKYFNLFDKELNEKEIKDLYDNQSNSGILKDFWGDYLQYD |
| | | KPYYMLNLYDPNKYVDVNNVGIRGYMYLKGPRGSVMTTNIYLNSSLYRGT |
| | | KFIIKKYASGNKDNIVRNNDRVYINVVVKNKEYRLATNASQAGVEKILSALEI |
| | | PDVGNLSQVVVMKSKNDQGITNKCKMNLQDNNGNDIGFIGFHQFNNIAK |
| | | LVASNWYNRQIERSSRTLGCSWEFIPVDDGWGERPL |
| 22 | BoNT/A1-Group 2 | MPFVNKQFNYKDPVNGVDIAYIKIPNAGQMQPVKAFKIHNKIWVIPERDT |
| | (K289R, K291R, | FTNPEEGDLNPPPEAKQVPVSYYDSTYLSTDNEKDNYLKGVTKLFERIYSTDL |
| | K299R, K381R) | GRMLLTSIVRGIPFWGGSTIDTELKVIDTNCINVIQPDGSYRSEELNLVIIGPS |
| | | ADIIQFECKSFGHEVLNLTRNGYGSTQYIRFSPDFTFGFEESLEVDTNPLLGA |
| | | GKFATDPAVTLAHELIHAGHRLYGIAINPNRVFKVNTNAYYEMSGLEVSFEE |
| | | LRTFGGHDAKFIDSLQENEFRLYYYNRFRDIASTLNRAKSIVGTTASLQYMK |
| | | NVFKEKYLLSEDTSGKFSVDKLKFDKLYKMLTEIYTEDNFVKFFKVLNRKTYL |
| | | NFDKAVFKINIVPRVNYTIYDGFNLRNTNLAANFNGQNTEINNMNFTKLKN |
| | | FTGLFEFYKLLCVRGIITSKTKSLDKGYNKALNDLCIKVNNWDLFFSPSEDNF |
| | | TNDLNKGEEITSDTNIEAAEENISLDLIQQYYLTFNFDNEPENISIENLSSDIIG |
| | | QLELMPNIERFPNGKKYELDKYTMFHYLRAQEFEHGKSRIALTNSVNEALLN |
| | | PSRVYTFFSSDYVKKVNKATEAAMFLGWVEQLVYDFTDETSEVSTTDKIADI |
| | | TIIIPYIGPALNIGNMLYKDDFVGALIFSGAVILLEFIPEIAIPVLGTFALVSYIAN |
| | | KVLTVQTIDNALSKRNEKWDEVYKYIVTNWLAKVNTQIDLIRKKMKEALEN |
| | | QAEATKAIINYQYNQYTEEEKNNINFNIDDLSSKLNESINKAMININKFLNQC |
| | | SVSYLMNSMIPYGVKRLEDFDASLKDALLKYIYDNRGTLIGQVDRLKDKVN |
| | | NTLSTDIPFQLSKYVDNQRLLSTFTEYIKNIINTSILNLRYESNHLIDLSRYASKI |
| | | NIGSKVNFDPIDKNQIQLFNLESSKIEVILKNAIVYNSMYENFSTSFWIRIPKY |
| | | FNSISLNNEYTIINCMENNSGWKVSLNYGEIIWTLQDTQEIKQRVVFKYSQ |
| | | MINISDYINRWIFVTITNNRLNNSKIYINGRLIDQKPISNLGNIHASNNIMFKL |
| | | DGCRDTHRYIWIKYFNLFDKELNEKEIKDLYDNQSNSGILKDFWGDYLQYD |
| | | KPYYMLNLYDPNKYVDVNNVGIRGYMYLKGPRGSVMTTNIYLNSSLYRGT |
| | | KFIIKKYASGNKDNIVRNNDRVYINVVVKNKEYRLATNASQAGVEKILSALEI |
| | | PDVGNLSQVVVMKSKNDQGITNKCKMNLQDNNGNDIGFIGFHQFNNIAK |
| | | LVASNWYNRQIERSSRTLGCSWEFIPVDDGWGERPL |
| 23 | BoNT/A1-Group 3 | MPFVNKQFNYKDPVNGVDIAYIKIPNAGQMQPVKAFKIHNKIWVIPERDT |
| | (K212R, K272R, | FTNPEEGDLNPPPEAKQVPVSYYDSTYLSTDNEKDNYLKGVTKLFERIYSTDL |
| | K356R) | GRMLLTSIVRGIPFWGGSTIDTELKVIDTNCINVIQPDGSYRSEELNLVIIGPS |
| | | ADIIQFECKSFGHEVLNLTRNGYGSTQYIRFSPDFTFGFEESLEVDTNPLLGA |
| | | GRFATDPAVTLAHELIHAGHRLYGIAINPNRVFKVNTNAYYEMSGLEVSFEE |
| | | LRTFGGHDARFIDSLQENEFRLYYYNKFKDIASTLNKAKSIVGTTASLQYMK |
| | | NVFKEKYLLSEDTSGKFSVDKLKFDKLYKMLTEIYTEDNFVRFFKVLNRKTYL |
| | | NFDKAVFKINIVPKVNYTIYDGFNLRNTNLAANFNGQNTEINNMNFTKLKN |
| | | FTGLFEFYKLLCVRGIITSKTKSLDKGYNKALNDLCIKVNNWDLFFSPSEDNF |
| | | TNDLNKGEEITSDTNIEAAEENISLDLIQQYYLTFNFDNEPENISIENLSSDIIG |
| | | QLELMPNIERFPNGKKYELDKYTMFHYLRAQEFEHGKSRIALTNSVNEALLN |
| | | PSRVYTFFSSDYVKKVNKATEAAMFLGWVEQLVYDFTDETSEVSTTDKIADI |
| | | TIIIPYIGPALNIGNMLYKDDFVGALIFSGAVILLEFIPEIAIPVLGTFALVSYIAN |
| | | KVLTVQTIDNALSKRNEKWDEVYKYIVTNWLAKVNTQIDLIRKKMKEALEN |
| | | QAEATKAIINYQYNQYTEEEKNNINFNIDDLSSKLNESINKAMININKFLNQC |
| | | SVSYLMNSMIPYGVKRLEDFDASLKDALLKYIYDNRGTLIGQVDRLKDKVN |
| | | NTLSTDIPFQLSKYVDNQRLLSTFTEYIKNIINTSILNLRYESNHLIDLSRYASKI |
| | | NIGSKVNFDPIDKNQIQLFNLESSKIEVILKNAIVYNSMYENFSTSFWIRIPKY |
| | | FNSISLNNEYTIINCMENNSGWKVSLNYGEIIWTLQDTQEIKQRVVFKYSQ |
| | | MINISDYINRWIFVTITNNRLNNSKIYINGRLIDQKPISNLGNIHASNNIMFKL |
| | | DGCRDTHRYIWIKYFNLFDKELNEKEIKDLYDNQSNSGILKDFWGDYLQYD |
| | | KPYYMLNLYDPNKYVDVNNVGIRGYMYLKGPRGSVMTTNIYLNSSLYRGT |
| | | KFIIKKYASGNKDNIVRNNDRVYINVVVKNKEYRLATNASQAGVEKILSALEI |
| | | PDVGNLSQVVVMKSKNDQGITNKCKMNLQDNNGNDIGFIGFHQFNNIAK |
| | | LVASNWYNRQIERSSRTLGCSWEFIPVDDGWGERPL |
| 24 | BoNT/A1-KR9 (K11R, | MPFVNKQFNYRDPVNGVDIAYIKIPNAGQMQPVKAFKIHNRIWVIPERDT |
| | K41R, K318R, K335R, | FTNPEEGDLNPPPEAKQVPVSYYDSTYLSTDNEKDNYLKGVTKLFERIYSTDL |
| | K337R, K340R, K343R, | GRMLLTSIVRGIPFWGGSTIDTELKVIDTNCINVIQPDGSYRSEELNLVIIGPS |
| | K375R, K415R) | ADIIQFECKSFGHEVLNLTRNGYGSTQYIRFSPDFTFGFEESLEVDTNPLLGA |
| | | GKFATDPAVTLAHELIHAGHRLYGIAINPNRVFKVNTNAYYEMSGLEVSFEE |
| | | LRTFGGHDAKFIDSLQENEFRLYYYNKFKDIASTLNKAKSIVGTTASLQYMK |
| | | NVFREKYLLSEDTSGKFSVDRLRFDRLYRMLTEIYTEDNFVKFFKVLNRKTYL |
| | | NFDKAVFRINIVPKVNYTIYDGFNLRNTNLAANFNGQNTEINNMNFTRLKN |
| | | FTGLFEFYKLLCVRGIITSKTKSLDKGYNKALNDLCIKVNNWDLFFSPSEDNF |
| | | TNDLNKGEEITSDTNIEAAEENISLDLIQQYYLTFNFDNEPENISIENLSSDIIG |
| | | QLELMPNIERFPNGKKYELDKYTMFHYLRAQEFEHGKSRIALTNSVNEALLN |
| | | PSRVYTFFSSDYVKKVNKATEAAMFLGWVEQLVYDFTDETSEVSTTDKIADI |
| | | TIIIPYIGPALNIGNMLYKDDFVGALIFSGAVILLEFIPEIAIPVLGTFALVSYIAN |
| | | KVLTVQTIDNALSKRNEKWDEVYKYIVTNWLAKVNTQIDLIRKKMKEALEN |
| | | QAEATKAIINYQYNQYTEEEKNNINFNIDDLSSKLNESINKAMININKFLNQC |
| | | SVSYLMNSMIPYGVKRLEDFDASLKDALLKYIYDNRGTLIGQVDRLKDKVN |
| | | NTLSTDIPFQLSKYVDNQRLLSTFTEYIKNIINTSILNLRYESNHLIDLSRYASKI |
| | | NIGSKVNFDPIDKNQIQLFNLESSKIEVILKNAIVYNSMYENFSTSFWIRIPKY |
| | | FNSISLNNEYTIINCMENNSGWKVSLNYGEIIWTLQDTQEIKQRVVFKYSQ |
| | | MINISDYINRWIFVTITNNRLNNSKIYINGRLIDQKPISNLGNIHASNNIMFKL |
| | | DGCRDTHRYIWIKYFNLFDKELNEKEIKDLYDNQSNSGILKDFWGDYLQYD |
| | | KPYYMLNLYDPNKYVDVNNVGIRGYMYLKGPRGSVMTTNIYLNSSLYRGT |
| | | KFIIKKYASGNKDNIVRNNDRVYINVVVKNKEYRLATNASQAGVEKILSALEI |
| | | PDVGNLSQVVVMKSKNDQGITNKCKMNLQDNNGNDIGFIGFHQFNNIAK |
| | | LVASNWYNRQIERSSRTLGCSWEFIPVDDGWGERPL |
| 25 | BoNT/A1-KR10 (K11R, | MPFVNKQFNYRDPVNGVDIAYIKIPNAGQMQPVKAFKIHNKIWVIPERDT |
| | K289R, K291R, K299R, | FTNPEEGDLNPPPEAKQVPVSYYDSTYLSTDNEKDNYLKGVTKLFERIYSTDL |
| | K335R, K337R, K343R, | GRMLLTSIVRGIPFWGGSTIDTELKVIDTNCINVIQPDGSYRSEELNLVIIGPS |
| | K375R, K381R, K415R) | ADIIQFECKSFGHEVLNLTRNGYGSTQYIRFSPDFTFGFEESLEVDTNPLLGA |
| | | GKFATDPAVTLAHELIHAGHRLYGIAINPNRVFKVNTNAYYEMSGLEVSFEE |
| | | LRTFGGHDAKFIDSLQENEFRLYYYNRFRDIASTLNRAKSIVGTTASLQYMK |
| | | NVFKEKYLLSEDTSGKFSVDRLRFDKLYRMLTEIYTEDNFVKFFKVLNRKTYL |
| | | NFDKAVFRINIVPRVNYTIYDGFNLRNTNLAANFNGQNTEINNMNFTRLK |
| | | NFTGLFEFYKLLCVRGIITSKTKSLDKGYNKALNDLCIKVNNWDLFFSPSEDN |
| | | FTNDLNKGEEITSDTNIEAAEENISLDLIQQYYLTFNFDNEPENISIENLSSDII |
| | | GQLELMPNIERFPNGKKYELDKYTMFHYLRAQEFEHGKSRIALTNSVNEALL |
| | | NPSRVYTFFSSDYVKKVNKATEAAMFLGWVEQLVYDFTDETSEVSTTDKIA |
| | | DITIIIPYIGPALNIGNMLYKDDFVGALIFSGAVILLEFIPEIAIPVLGTFALVSYI |
| | | ANKVLTVQTIDNALSKRNEKWDEVYKYIVTNWLAKVNTQIDLIRKKMKEAL |
| | | ENQAEATKAIINYQYNQYTEEEKNNINFNIDDLSSKLNESINKAMININKFLN |
| | | QCSVSYLMNSMIPYGVKRLEDFDASLKDALLKYIYDNRGTLIGQVDRLKDKV |
| | | NNTLSTDIPFQLSKYVDNQRLLSTFTEYIKNIINTSILNLRYESNHLIDLSRYASK |
| | | INIGSKVNFDPIDKNQIQLFNLESSKIEVILKNAIVYNSMYENFSTSFWIRIPKY |
| | | FNSISLNNEYTIINCMENNSGWKVSLNYGEIIWTLQDTQEIKQRVVFKYSQ |
| | | MINISDYINRWIFVTITNNRLNNSKIYINGRLIDQKPISNLGNIHASNNIMFKL |
| | | DGCRDTHRYIWIKYFNLFDKELNEKEIKDLYDNQSNSGILKDFWGDYLQYD |
| | | KPYYMLNLYDPNKYVDVNNVGIRGYMYLKGPRGSVMTTNIYLNSSLYRGT |
| | | KFIIKKYASGNKDNIVRNNDRVYINVVVKNKEYRLATNASQAGVEKILSALEI |
| | | PDVGNLSQVVVMKSKNDQGITNKCKMNLQDNNGNDIGFIGFHQFNNIAK |
| | | LVASNWYNRQIERSSRTLGCSWEFIPVDDGWGERPL |
| 26 | BoNT/A1-KR11-41 | MPFVNKQFNYRDPVNGVDIAYIKIPNAGQMQPVKAFKIHNRIWVIPERDT |
| | (K11R, K41R, K289R, | FTNPEEGDLNPPPEAKQVPVSYYDSTYLSTDNEKDNYLKGVTKLFERIYSTDL |
| | K291R, K299R, K335R, | GRMLLTSIVRGIPFWGGSTIDTELKVIDTNCINVIQPDGSYRSEELNLVIIGPS |
| | K337R, K343R, K375R, | ADIIQFECKSFGHEVLNLTRNGYGSTQYIRFSPDFTFGFEESLEVDTNPLLGA |
| | K381R, K415R) | GKFATDPAVTLAHELIHAGHRLYGIAINPNRVFKVNTNAYYEMSGLEVSFEE |
| | | LRTFGGHDAKFIDSLQENEFRLYYYNRFRDIASTLNRAKSIVGTTASLQYMK |
| | | NVFKEKYLLSEDTSGKFSVDRLRFDKLYRMLTEIYTEDNFVKFFKVLNRKTYL |
| | | NFDKAVFRINIVPRVNYTIYDGFNLRNTNLAANFNGQNTEINNMNFTRLK |
| | | NFTGLFEFYKLLCVRGIITSKTKSLDKGYNKALNDLCIKVNNWDLFFSPSEDN |
| | | FTNDLNKGEEITSDTNIEAAEENISLDLIQQYYLTFNFDNEPENISIENLSSDII |
| | | GQLELMPNIERFPNGKKYELDKYTMFHYLRAQEFEHGKSRIALTNSVNEALL |
| | | NPSRVYTFFSSDYVKKVNKATEAAMFLGWVEQLVYDFTDETSEVSTTDKIA |
| | | DITIIIPYIGPALNIGNMLYKDDFVGALIFSGAVILLEFIPEIAIPVLGTFALVSYI |
| | | ANKVLTVQTIDNALSKRNEKWDEVYKYIVTNWLAKVNTQIDLIRKKMKEAL |
| | | ENQAEATKAIINYQYNQYTEEEKNNINFNIDDLSSKLNESINKAMININKFLN |
| | | QCSVSYLMNSMIPYGVKRLEDFDASLKDALLKYIYDNRGTLIGQVDRLKDKV |
| | | NNTLSTDIPFQLSKYVDNQRLLSTFTEYIKNIINTSILNLRYESNHLIDLSRYASK |
| | | INIGSKVNFDPIDKNQIQLFNLESSKIEVILKNAIVYNSMYENFSTSFWIRIPKY |
| | | FNSISLNNEYTIINCMENNSGWKVSLNYGEIIWTLQDTQEIKQRVVFKYSQ |
| | | MINISDYINRWIFVTITNNRLNNSKIYINGRLIDQKPISNLGNIHASNNIMFKL |
| | | DGCRDTHRYIWIKYFNLFDKELNEKEIKDLYDNQSNSGILKDFWGDYLQYD |
| | | KPYYMLNLYDPNKYVDVNNVGIRGYMYLKGPRGSVMTTNIYLNSSLYRGT |
| | | KFIIKKYASGNKDNIVRNNDRVYINVVVKNKEYRLATNASQAGVEKILSALEI |
| | | PDVGNLSQVVVMKSKNDQGITNKCKMNLQDNNGNDIGFIGFHQFNNIAK |
| | | LVASNWYNRQIERSSRTLGCSWEFIPVDDGWGERPL |
| 27 | BoNT/A1-KR11-212 | MPFVNKQFNYRDPVNGVDIAYIKIPNAGQMQPVKAFKIHNKIWVIPERDT |
| | (K11R, K212R, K289R, | FTNPEEGDLNPPPEAKQVPVSYYDSTYLSTDNEKDNYLKGVTKLFERIYSTDL |
| | K291R, K299R, K335R, | GRMLLTSIVRGIPFWGGSTIDTELKVIDTNCINVIQPDGSYRSEELNLVIIGPS |
| | K337R, K343R, K375R, | ADIIQFECKSFGHEVLNLTRNGYGSTQYIRFSPDFTFGFEESLEVDTNPLLGA |
| | K381R, K415R) | GRFATDPAVTLAHELIHAGHRLYGIAINPNRVFKVNTNAYYEMSGLEVSFEE |
| | | LRTFGGHDAKFIDSLQENEFRLYYYNRFRDIASTLNRAKSIVGTTASLQYMK |
| | | NVFKEKYLLSEDTSGKFSVDRLRFDKLYRMLTEIYTEDNFVKFFKVLNRKTYL |
| | | NFDKAVFRINIVPRVNYTIYDGFNLRNTNLAANFNGQNTEINNMNFTRLK |
| | | NFTGLFEFYKLLCVRGIITSKTKSLDKGYNKALNDLCIKVNNWDLFFSPSEDN |
| | | FTNDLNKGEEITSDTNIEAAEENISLDLIQQYYLTFNFDNEPENISIENLSSDII |
| | | GQLELMPNIERFPNGKKYELDKYTMFHYLRAQEFEHGKSRIALTNSVNEALL |
| | | NPSRVYTFFSSDYVKKVNKATEAAMFLGWVEQLVYDFTDETSEVSTTDKIA |
| | | DITIIIPYIGPALNIGNMLYKDDFVGALIFSGAVILLEFIPEIAIPVLGTFALVSYI |
| | | ANKVLTVQTIDNALSKRNEKWDEVYKYIVTNWLAKVNTQIDLIRKKMKEAL |
| | | ENQAEATKAIINYQYNQYTEEEKNNINFNIDDLSSKLNESINKAMININKFLN |
| | | QCSVSYLMNSMIPYGVKRLEDFDASLKDALLKYIYDNRGTLIGQVDRLKDKV |
| | | NNTLSTDIPFQLSKYVDNQRLLSTFTEYIKNIINTSILNLRYESNHLIDLSRYASK |
| | | INIGSKVNFDPIDKNQIQLFNLESSKIEVILKNAIVYNSMYENFSTSFWIRIPKY |
| | | FNSISLNNEYTIINCMENNSGWKVSLNYGEIIWTLQDTQEIKQRVVFKYSQ |
| | | MINISDYINRWIFVTITNNRLNNSKIYINGRLIDQKPISNLGNIHASNNIMFKL |
| | | DGCRDTHRYIWIKYFNLFDKELNEKEIKDLYDNQSNSGILKDFWGDYLQYD |
| | | KPYYMLNLYDPNKYVDVNNVGIRGYMYLKGPRGSVMTTNIYLNSSLYRGT |
| | | KFIIKKYASGNKDNIVRNNDRVYINVVVKNKEYRLATNASQAGVEKILSALEI |
| | | PDVGNLSQVVVMKSKNDQGITNKCKMNLQDNNGNDIGFIGFHQFNNIAK |
| | | LVASNWYNRQIERSSRTLGCSWEFIPVDDGWGERPL |
| 28 | BoNT/A1-KR11-272 | MPFVNKQFNYRDPVNGVDIAYIKIPNAGQMQPVKAFKIHNKIWVIPERDT |
| | (K11R, K272R, K289R, | FTNPEEGDLNPPPEAKQVPVSYYDSTYLSTDNEKDNYLKGVTKLFERIYSTDL |
| | K291R, K299R, K335R, | GRMLLTSIVRGIPFWGGSTIDTELKVIDTNCINVIQPDGSYRSEELNLVIIGPS |
| | K337R, K343R, K375R, | ADIIQFECKSFGHEVLNLTRNGYGSTQYIRFSPDFTFGFEESLEVDTNPLLGA |
| | K381R, K415R) | GKFATDPAVTLAHELIHAGHRLYGIAINPNRVFKVNTNAYYEMSGLEVSFEE |
| | | LRTFGGHDARFIDSLQENEFRLYYYNRFRDIASTLNRAKSIVGTTASLQYMK |
| | | NVFKEKYLLSEDTSGKFSVDRLRFDKLYRMLTEIYTEDNFVKFFKVLNRKTYL |
| | | NFDKAVFRINIVPRVNYTIYDGFNLRNTNLAANFNGQNTEINNMNFTRLK |
| | | NFTGLFEFYKLLCVRGIITSKTKSLDKGYNKALNDLCIKVNNWDLFFSPSEDN |
| | | FTNDLNKGEEITSDTNIEAAEENISLDLIQQYYLTFNFDNEPENISIENLSSDII |
| | | GQLELMPNIERFPNGKKYELDKYTMFHYLRAQEFEHGKSRIALTNSVNEALL |
| | | NPSRVYTFFSSDYVKKVNKATEAAMFLGWVEQLVYDFTDETSEVSTTDKIA |
| | | DITIIIPYIGPALNIGNMLYKDDFVGALIFSGAVILLEFIPEIAIPVLGTFALVSYI |
| | | ANKVLTVQTIDNALSKRNEKWDEVYKYIVTNWLAKVNTQIDLIRKKMKEAL |
| | | ENQAEATKAIINYQYNQYTEEEKNNINFNIDDLSSKLNESINKAMININKFLN |
| | | QCSVSYLMNSMIPYGVKRLEDFDASLKDALLKYIYDNRGTLIGQVDRLKDKV |
| | | NNTLSTDIPFQLSKYVDNQRLLSTFTEYIKNIINTSILNLRYESNHLIDLSRYASK |
| | | INIGSKVNFDPIDKNQIQLFNLESSKIEVILKNAIVYNSMYENFSTSFWIRIPKY |
| | | FNSISLNNEYTIINCMENNSGWKVSLNYGEIIWTLQDTQEIKQRVVFKYSQ |
| | | MINISDYINRWIFVTITNNRLNNSKIYINGRLIDQKPISNLGNIHASNNIMFKL |
| | | DGCRDTHRYIWIKYFNLFDKELNEKEIKDLYDNQSNSGILKDFWGDYLQYD |
| | | KPYYMLNLYDPNKYVDVNNVGIRGYMYLKGPRGSVMTTNIYLNSSLYRGT |
| | | KFIIKKYASGNKDNIVRNNDRVYINVVVKNKEYRLATNASQAGVEKILSALEI |
| | | PDVGNLSQVVVMKSKNDQGITNKCKMNLQDNNGNDIGFIGFHQFNNIAK |
| | | LVASNWYNRQIERSSRTLGCSWEFIPVDDGWGERPL |
| 29 | BoNT/A1-KR11-318 | MPFVNKQFNYRDPVNGVDIAYIKIPNAGQMQPVKAFKIHNKIWVIPERDT |
| | (K11R, K289R, K291R, | FTNPEEGDLNPPPEAKQVPVSYYDSTYLSTDNEKDNYLKGVTKLFERIYSTDL |
| | K299R, K318R, K335R, | GRMLLTSIVRGIPFWGGSTIDTELKVIDTNCINVIQPDGSYRSEELNLVIIGPS |
| | K337R, K343R, K375R, | ADIIQFECKSFGHEVLNLTRNGYGSTQYIRFSPDFTFGFEESLEVDTNPLLGA |
| | K381R, K415R) | GKFATDPAVTLAHELIHAGHRLYGIAINPNRVFKVNTNAYYEMSGLEVSFEE |
| | | LRTFGGHDAKFIDSLQENEFRLYYYNRFRDIASTLNRAKSIVGTTASLQYMK |
| | | NVFREKYLLSEDTSGKFSVDRLRFDKLYRMLTEIYTEDNFVKFFKVLNRKTYL |
| | | NFDKAVFRINIVPRVNYTIYDGFNLRNTNLAANFNGQNTEINNMNFTRLK |
| | | NFTGLFEFYKLLCVRGIITSKTKSLDKGYNKALNDLCIKVNNWDLFFSPSEDN |
| | | FTNDLNKGEEITSDTNIEAAEENISLDLIQQYYLTFNFDNEPENISIENLSSDII |
| | | GQLELMPNIERFPNGKKYELDKYTMFHYLRAQEFEHGKSRIALTNSVNEALL |
| | | NPSRVYTFFSSDYVKKVNKATEAAMFLGWVEQLVYDFTDETSEVSTTDKIA |
| | | DITIIIPYIGPALNIGNMLYKDDFVGALIFSGAVILLEFIPEIAIPVLGTFALVSYI |
| | | ANKVLTVQTIDNALSKRNEKWDEVYKYIVTNWLAKVNTQIDLIRKKMKEAL |
| | | ENQAEATKAIINYQYNQYTEEEKNNINFNIDDLSSKLNESINKAMININKFLN |
| | | QCSVSYLMNSMIPYGVKRLEDFDASLKDALLKYIYDNRGTLIGQVDRLKDKV |
| | | NNTLSTDIPFQLSKYVDNQRLLSTFTEYIKNIINTSILNLRYESNHLIDLSRYASK |
| | | INIGSKVNFDPIDKNQIQLFNLESSKIEVILKNAIVYNSMYENFSTSFWIRIPKY |
| | | FNSISLNNEYTIINCMENNSGWKVSLNYGEIIWTLQDTQEIKQRVVFKYSQ |
| | | MINISDYINRWIFVTITNNRLNNSKIYINGRLIDQKPISNLGNIHASNNIMFKL |
| | | DGCRDTHRYIWIKYFNLFDKELNEKEIKDLYDNQSNSGILKDFWGDYLQYD |
| | | KPYYMLNLYDPNKYVDVNNVGIRGYMYLKGPRGSVMTTNIYLNSSLYRGT |
| | | KFIIKKYASGNKDNIVRNNDRVYINVVVKNKEYRLATNASQAGVEKILSALEI |
| | | PDVGNLSQVVVMKSKNDQGITNKCKMNLQDNNGNDIGFIGFHQFNNIAK |
| | | LVASNWYNRQIERSSRTLGCSWEFIPVDDGWGERPL |
| 30 | BoNT/A1-KR11-340 | MPFVNKQFNYRDPVNGVDIAYIKIPNAGQMQPVKAFKIHNKIWVIPERDT |
| | (K11R, K289R, K291R, | FTNPEEGDLNPPPEAKQVPVSYYDSTYLSTDNEKDNYLKGVTKLFERIYSTDL |
| | K299R, K335R, K337R, | GRMLLTSIVRGIPFWGGSTIDTELKVIDTNCINVIQPDGSYRSEELNLVIIGPS |
| | K340R, K343R, K375R, | ADIIQFECKSFGHEVLNLTRNGYGSTQYIRFSPDFTFGFEESLEVDTNPLLGA |
| | K381R, K415R) | GKFATDPAVTLAHELIHAGHRLYGIAINPNRVFKVNTNAYYEMSGLEVSFEE |
| | | LRTFGGHDAKFIDSLQENEFRLYYYNRFRDIASTLNRAKSIVGTTASLQYMK |
| | | NVFKEKYLLSEDTSGKFSVDRLRFDRLYRMLTEIYTEDNFVKFFKVLNRKTYL |
| | | NFDKAVFRINIVPRVNYTIYDGFNLRNTNLAANFNGQNTEINNMNFTRLK |
| | | NFTGLFEFYKLLCVRGIITSKTKSLDKGYNKALNDLCIKVNNWDLFFSPSEDN |
| | | FTNDLNKGEEITSDTNIEAAEENISLDLIQQYYLTFNFDNEPENISIENLSSDII |
| | | GQLELMPNIERFPNGKKYELDKYTMFHYLRAQEFEHGKSRIALTNSVNEALL |
| | | NPSRVYTFFSSDYVKKVNKATEAAMFLGWVEQLVYDFTDETSEVSTTDKIA |
| | | DITIIIPYIGPALNIGNMLYKDDFVGALIFSGAVILLEFIPEIAIPVLGTFALVSYI |
| | | ANKVLTVQTIDNALSKRNEKWDEVYKYIVTNWLAKVNTQIDLIRKKMKEAL |
| | | ENQAEATKAIINYQYNQYTEEEKNNINFNIDDLSSKLNESINKAMININKFLN |
| | | QCSVSYLMNSMIPYGVKRLEDFDASLKDALLKYIYDNRGTLIGQVDRLKDKV |
| | | NNTLSTDIPFQLSKYVDNQRLLSTFTEYIKNIINTSILNLRYESNHLIDLSRYASK |
| | | INIGSKVNFDPIDKNQIQLFNLESSKIEVILKNAIVYNSMYENFSTSFWIRIPKY |
| | | FNSISLNNEYTIINCMENNSGWKVSLNYGEIIWTLQDTQEIKQRVVFKYSQ |
| | | MINISDYINRWIFVTITNNRLNNSKIYINGRLIDQKPISNLGNIHASNNIMFKL |
| | | DGCRDTHRYIWIKYFNLFDKELNEKEIKDLYDNQSNSGILKDFWGDYLQYD |
| | | KPYYMLNLYDPNKYVDVNNVGIRGYMYLKGPRGSVMTTNIYLNSSLYRGT |
| | | KFIIKKYASGNKDNIVRNNDRVYINVVVKNKEYRLATNASQAGVEKILSALEI |
| | | PDVGNLSQVVVMKSKNDQGITNKCKMNLQDNNGNDIGFIGFHQFNNIAK |
| | | LVASNWYNRQIERSSRTLGCSWEFIPVDDGWGERPL |
| 31 | BoNT/A1-KR11-356 | MPFVNKQFNYRDPVNGVDIAYIKIPNAGQMQPVKAFKIHNKIWVIPERDT |
| | (K11R, K289R, K291R, | FTNPEEGDLNPPPEAKQVPVSYYDSTYLSTDNEKDNYLKGVTKLFERIYSTDL |
| | K299R, K335R, K337R, | GRMLLTSIVRGIPFWGGSTIDTELKVIDTNCINVIQPDGSYRSEELNLVIIGPS |
| | K343R, K356R, K375R, | ADIIQFECKSFGHEVLNLTRNGYGSTQYIRFSPDFTFGFEESLEVDTNPLLGA |
| | K381R, K415R) | GKFATDPAVTLAHELIHAGHRLYGIAINPNRVFKVNTNAYYEMSGLEVSFEE |
| | | LRTFGGHDAKFIDSLQENEFRLYYYNRFRDIASTLNRAKSIVGTTASLQYMK |
| | | NVFKEKYLLSEDTSGKFSVDRLRFDKLYRMLTEIYTEDNFVRFFKVLNRKTYL |
| | | NFDKAVFRINIVPRVNYTIYDGFNLRNTNLAANFNGQNTEINNMNFTRLK |
| | | NFTGLFEFYKLLCVRGIITSKTKSLDKGYNKALNDLCIKVNNWDLFFSPSEDN |
| | | FTNDLNKGEEITSDTNIEAAEENISLDLIQQYYLTFNFDNEPENISIENLSSDII |
| | | GQLELMPNIERFPNGKKYELDKYTMFHYLRAQEFEHGKSRIALTNSVNEALL |
| | | NPSRVYTFFSSDYVKKVNKATEAAMFLGWVEQLVYDFTDETSEVSTTDKIA |
| | | DITIIIPYIGPALNIGNMLYKDDFVGALIFSGAVILLEFIPEIAIPVLGTFALVSYI |
| | | ANKVLTVQTIDNALSKRNEKWDEVYKYIVTNWLAKVNTQIDLIRKKMKEAL |
| | | ENQAEATKAIINYQYNQYTEEEKNNINFNIDDLSSKLNESINKAMININKFLN |
| | | QCSVSYLMNSMIPYGVKRLEDFDASLKDALLKYIYDNRGTLIGQVDRLKDKV |
| | | NNTLSTDIPFQLSKYVDNQRLLSTFTEYIKNIINTSILNLRYESNHLIDLSRYASK |
| | | INIGSKVNFDPIDKNQIQLFNLESSKIEVILKNAIVYNSMYENFSTSFWIRIPKY |
| | | FNSISLNNEYTIINCMENNSGWKVSLNYGEIIWTLQDTQEIKQRVVFKYSQ |
| | | MINISDYINRWIFVTITNNRLNNSKIYINGRLIDQKPISNLGNIHASNNIMFKL |
| | | DGCRDTHRYIWIKYFNLFDKELNEKEIKDLYDNQSNSGILKDFWGDYLQYD |
| | | KPYYMLNLYDPNKYVDVNNVGIRGYMYLKGPRGSVMTTNIYLNSSLYRGT |
| | | KFIIKKYASGNKDNIVRNNDRVYINVVVKNKEYRLATNASQAGVEKILSALEI |
| | | PDVGNLSQVVVMKSKNDQGITNKCKMNLQDNNGNDIGFIGFHQFNNIAK |
| | | LVASNWYNRQIERSSRTLGCSWEFIPVDDGWGERPL |
| 32 | BoNT/A1-KR13 (K11R, | MPFVNKQFNYRDPVNGVDIAYIKIPNAGQMQPVKAFKIHNRIWVIPERDT |
| | K41R, K289R, K291R, | FTNPEEGDLNPPPEAKQVPVSYYDSTYLSTDNEKDNYLKGVTKLFERIYSTDL |
| | K299R, K318R, K335R, | GRMLLTSIVRGIPFWGGSTIDTELKVIDTNCINVIQPDGSYRSEELNLVIIGPS |
| | K337R, K340R, K343R, | ADIIQFECKSFGHEVLNLTRNGYGSTQYIRFSPDFTFGFEESLEVDTNPLLGA |
| | K375R, K381R, K415R) | GKFATDPAVTLAHELIHAGHRLYGIAINPNRVFKVNTNAYYEMSGLEVSFEE |
| | | LRTFGGHDAKFIDSLQENEFRLYYYNRFRDIASTLNRAKSIVGTTASLQYMK |
| | | NVFREKYLLSEDTSGKFSVDRLRFDRLYRMLTEIYTEDNFVKFFKVLNRKTYL |
| | | NFDKAVFRINIVPRVNYTIYDGFNLRNTNLAANFNGQNTEINNMNFTRLK |
| | | NFTGLFEFYKLLCVRGIITSKTKSLDKGYNKALNDLCIKVNNWDLFFSPSEDN |
| | | FTNDLNKGEEITSDTNIEAAEENISLDLIQQYYLTFNFDNEPENISIENLSSDII |
| | | GQLELMPNIERFPNGKKYELDKYTMFHYLRAQEFEHGKSRIALTNSVNEALL |
| | | NPSRVYTFFSSDYVKKVNKATEAAMFLGWVEQLVYDFTDETSEVSTTDKIA |
| | | DITIIIPYIGPALNIGNMLYKDDFVGALIFSGAVILLEFIPEIAIPVLGTFALVSYI |
| | | ANKVLTVQTIDNALSKRNEKWDEVYKYIVTNWLAKVNTQIDLIRKKMKEAL |
| | | ENQAEATKAIINYQYNQYTEEEKNNINFNIDDLSSKLNESINKAMININKFLN |
| | | QCSVSYLMNSMIPYGVKRLEDFDASLKDALLKYIYDNRGTLIGQVDRLKDKV |
| | | NNTLSTDIPFQLSKYVDNQRLLSTFTEYIKNIINTSILNLRYESNHLIDLSRYASK |
| | | INIGSKVNFDPIDKNQIQLFNLESSKIEVILKNAIVYNSMYENFSTSFWIRIPKY |
| | | FNSISLNNEYTIINCMENNSGWKVSLNYGEIIWTLQDTQEIKQRVVFKYSQ |
| | | MINISDYINRWIFVTITNNRLNNSKIYINGRLIDQKPISNLGNIHASNNIMFKL |
| | | DGCRDTHRYIWIKYFNLFDKELNEKEIKDLYDNQSNSGILKDFWGDYLQYD |
| | | KPYYMLNLYDPNKYVDVNNVGIRGYMYLKGPRGSVMTTNIYLNSSLYRGT |
| | | KFIIKKYASGNKDNIVRNNDRVYINVVVKNKEYRLATNASQAGVEKILSALEI |
| | | PDVGNLSQVVVMKSKNDQGITNKCKMNLQDNNGNDIGFIGFHQFNNIAK |
| | | LVASNWYNRQIERSSRTLGCSWEFIPVDDGWGERPL |
| 33 | BoNT/A1-KR15 (K11R, | MPFVNKQFNYRDPVNGVDIAYIKIPNAGQMQPVKAFKIHNRIWVIPERDT |
| | K41R, K212R, K289R, | FTNPEEGDLNPPPEAKQVPVSYYDSTYLSTDNEKDNYLKGVTKLFERIYSTDL |
| | K291R, K299R, K318R, | GRMLLTSIVRGIPFWGGSTIDTELKVIDTNCINVIQPDGSYRSEELNLVIIGPS |
| | K335R, K337R, K340R, | ADIIQFECKSFGHEVLNLTRNGYGSTQYIRFSPDFTFGFEESLEVDTNPLLGA |
| | K343R, K356R, K375R, | GRFATDPAVTLAHELIHAGHRLYGIAINPNRVFKVNTNAYYEMSGLEVSFEE |
| | K381R, K415R) | LRTFGGHDAKFIDSLQENEFRLYYYNRFRDIASTLNRAKSIVGTTASLQYMK |
| | | NVFREKYLLSEDTSGKFSVDRLRFDRLYRMLTEIYTEDNFVRFFKVLNRKTYL |
| | | NFDKAVFRINIVPRVNYTIYDGFNLRNTNLAANFNGQNTEINNMNFTRLK |
| | | NFTGLFEFYKLLCVRGIITSKTKSLDKGYNKALNDLCIKVNNWDLFFSPSEDN |
| | | FTNDLNKGEEITSDTNIEAAEENISLDLIQQYYLTFNFDNEPENISIENLSSDII |
| | | GQLELMPNIERFPNGKKYELDKYTMFHYLRAQEFEHGKSRIALTNSVNEALL |
| | | NPSRVYTFFSSDYVKKVNKATEAAMFLGWVEQLVYDFTDETSEVSTTDKIA |
| | | DITIIIPYIGPALNIGNMLYKDDFVGALIFSGAVILLEFIPEIAIPVLGTFALVSYI |
| | | ANKVLTVQTIDNALSKRNEKWDEVYKYIVTNWLAKVNTQIDLIRKKMKEAL |
| | | ENQAEATKAIINYQYNQYTEEEKNNINFNIDDLSSKLNESINKAMININKFLN |
| | | QCSVSYLMNSMIPYGVKRLEDFDASLKDALLKYIYDNRGTLIGQVDRLKDKV |
| | | NNTLSTDIPFQLSKYVDNQRLLSTFTEYIKNIINTSILNLRYESNHLIDLSRYASK |
| | | INIGSKVNFDPIDKNQIQLFNLESSKIEVILKNAIVYNSMYENFSTSFWIRIPKY |
| | | FNSISLNNEYTIINCMENNSGWKVSLNYGEIIWTLQDTQEIKQRVVFKYSQ |
| | | MINISDYINRWIFVTITNNRLNNSKIYINGRLIDQKPISNLGNIHASNNIMFKL |
| | | DGCRDTHRYIWIKYFNLFDKELNEKEIKDLYDNQSNSGILKDFWGDYLQYD |
| | | KPYYMLNLYDPNKYVDVNNVGIRGYMYLKGPRGSVMTTNIYLNSSLYRGT |
| | | KFIIKKYASGNKDNIVRNNDRVYINVVVKNKEYRLATNASQAGVEKILSALEI |
| | | PDVGNLSQVVVMKSKNDQGITNKCKMNLQDNNGNDIGFIGFHQFNNIAK |
| | | LVASNWYNRQIERSSRTLGCSWEFIPVDDGWGERPL |
| 34 | BoNT/A1-KR16 (K11R, | MPFVNKQFNYRDPVNGVDIAYIKIPNAGQMQPVKAFKIHNRIWVIPERDT |
| | K41R, K212R, K272R, | FTNPEEGDLNPPPEAKQVPVSYYDSTYLSTDNEKDNYLKGVTKLFERIYSTDL |
| | K289R, K291R, K299R, | GRMLLTSIVRGIPFWGGSTIDTELKVIDTNCINVIQPDGSYRSEELNLVIIGPS |
| | K318R, K335R, K337R, | ADIIQFECKSFGHEVLNLTRNGYGSTQYIRFSPDFTFGFEESLEVDTNPLLGA |
| | K340R, K343R, K356R, | GRFATDPAVTLAHELIHAGHRLYGIAINPNRVFKVNTNAYYEMSGLEVSFEE |
| | K375R, K381R, K415R) | LRTFGGHDARFIDSLQENEFRLYYYNRFRDIASTLNRAKSIVGTTASLQYMK |
| | | NVFREKYLLSEDTSGKFSVDRLRFDRLYRMLTEIYTEDNFVRFFKVLNRKTYL |
| | | NFDKAVFRINIVPRVNYTIYDGFNLRNTNLAANFNGQNTEINNMNFTRLK |
| | | NFTGLFEFYKLLCVRGIITSKTKSLDKGYNKALNDLCIKVNNWDLFFSPSEDN |
| | | FTNDLNKGEEITSDTNIEAAEENISLDLIQQYYLTFNFDNEPENISIENLSSDII |
| | | GQLELMPNIERFPNGKKYELDKYTMFHYLRAQEFEHGKSRIALTNSVNEALL |
| | | NPSRVYTFFSSDYVKKVNKATEAAMFLGWVEQLVYDFTDETSEVSTTDKIA |
| | | DITIIIPYIGPALNIGNMLYKDDFVGALIFSGAVILLEFIPEIAIPVLGTFALVSYI |
| | | ANKVLTVQTIDNALSKRNEKWDEVYKYIVTNWLAKVNTQIDLIRKKMKEAL |
| | | ENQAEATKAIINYQYNQYTEEEKNNINFNIDDLSSKLNESINKAMININKFLN |
| | | QCSVSYLMNSMIPYGVKRLEDFDASLKDALLKYIYDNRGTLIGQVDRLKDKV |
| | | NNTLSTDIPFQLSKYVDNQRLLSTFTEYIKNIINTSILNLRYESNHLIDLSRYASK |
| | | INIGSKVNFDPIDKNQIQLFNLESSKIEVILKNAIVYNSMYENFSTSFWIRIPKY |
| | | FNSISLNNEYTIINCMENNSGWKVSLNYGEIIWTLQDTQEIKQRVVFKYSQ |
| | | MINISDYINRWIFVTITNNRLNNSKIYINGRLIDQKPISNLGNIHASNNIMFKL |
| | | DGCRDTHRYIWIKYFNLFDKELNEKEIKDLYDNQSNSGILKDFWGDYLQYD |
| | | KPYYMLNLYDPNKYVDVNNVGIRGYMYLKGPRGSVMTTNIYLNSSLYRGT |
| | | KFIIKKYASGNKDNIVRNNDRVYINVVVKNKEYRLATNASQAGVEKILSALEI |
| | | PDVGNLSQVVVMKSKNDQGITNKCKMNLQDNNGNDIGFIGFHQFNNIAK |
| | | LVASNWYNRQIERSSRTLGCSWEFIPVDDGWGERPL |
| 35 | BoNT/A2-WT | MPFVNKQFNYKDPVNGVDIAYIKIPNAGQMQPVKAFKIHNKIWVIPERDT |
| | | FTNPEEGDLNPPPEAKQVPVSYYDSTYLSTDNEKDNYLKGVTKLFERIYSTDL |
| | | GRMLLTSIVRGIPFWGGSTIDTELKVIDTNCINVIQPDGSYRSEELNLVIIGPS |
| | | ADIIQFECKSFGHDVLNLTRNGYGSTQYIRFSPDFTFGFEESLEVDTNPLLGA |
| | | GKFATDPAVTLAHELIHAEHRLYGIAINPNRVFKVNTNAYYEMSGLEVSFEE |
| | | LRTFGGHDAKFIDSLQENEFRLYYYNKFKDVASTLNKAKSIIGTTASLQYMK |
| | | NVFKEKYLLSEDTSGKFSVDKLKFDKLYKMLTEIYTEDNFVNFFKVINRKTYL |
| | | NFDKAVFRINIVPDENYTIKDGFNLKGANLSTNFNGQNTEINSRNFTRLKNF |
| | | TGLFEFYKLLCVRGIIPFKTKSLDEGYNKALNDLCIKVNNWDLFFSPSEDNFT |
| | | NDLDKVEEITADTNIEAAEENISLDLIQQYYLTFDFDNEPENISIENLSSDIIGQ |
| | | LEPMPNIERFPNGKKYELDKYTMFHYLRAQEFEHGDSRIILTNSAEEALLKP |
| | | NVAYTFFSSKYVKKINKAVEAFMFLNWAEELVYDFTDETNEVTTMDKIADI |
| | | TIIVPYIGPALNIGNMLSKGEFVEAIIFTGVVAMLEFIPEYALPVFGTFAIVSYI |
| | | ANKVLTVQTINNALSKRNEKWDEVYKYTVTNWLAKVNTQIDLIREKMKKA |
| | | LENQAEATKAIINYQYNQYTEEEKNNINFNIDDLSSKLNESINSAMININKFL |
| | | DQCSVSYLMNSMIPYAVKRLKDFDASVRDVLLKYIYDNRGTLVLQVDRLKD |
| | | EVNNTLSADIPFQLSKYVDNKKLLSTFTEYIKNIVNTSILSIVYKKDDLIDLSRY |
| | | GAKINIGDRVYYDSIDKNQIKLINLESSTIEVILKNAIVYNSMYENFSTSFWIKI |
| | | PKYFSKINLNNEYTIINCIENNSGWKVSLNYGEIIWTLQDNKQNIQRVVFKYS |
| | | QMVNISDYINRWIFVTITNNRLTKSKIYINGRLIDQKPISNLGNIHASNKIMF |
| | | KLDGCRDPRRYIMIKYFNLFDKELNEKEIKDLYDSQSNSGILKDFWGNYLQY |
| | | DKPYYMLNLFDPNKYVDVNNIGIRGYMYLKGPRGSVVTTNIYLNSTLYEGT |
| | | KFIIKKYASGNEDNIVRNNDRVYINVVVKNKEYRLATNASQAGVEKILSALEI |
| | | PDVGNLSQVVVMKSKDDQGIRNKCKMNLQDNNGNDIGFIGFHLYDNIAK |
| | | LVASNWYNRQVGKASRTFGCSWEFIPVDDGWGESSL |
| 36 | BoNT/A2-K11R | MPFVNKQFNYRDPVNGVDIAYIKIPNAGQMQPVKAFKIHNKIWVIPERDT |
| | | FTNPEEGDLNPPPEAKQVPVSYYDSTYLSTDNEKDNYLKGVTKLFERIYSTDL |
| | | GRMLLTSIVRGIPFWGGSTIDTELKVIDTNCINVIQPDGSYRSEELNLVIIGPS |
| | | ADIIQFECKSFGHDVLNLTRNGYGSTQYIRFSPDFTFGFEESLEVDTNPLLGA |
| | | GKFATDPAVTLAHELIHAEHRLYGIAINPNRVFKVNTNAYYEMSGLEVSFEE |
| | | LRTFGGHDAKFIDSLQENEFRLYYYNKFKDVASTLNKAKSIIGTTASLQYMK |
| | | NVFKEKYLLSEDTSGKFSVDKLKFDKLYKMLTEIYTEDNFVNFFKVINRKTYL |
| | | NFDKAVFRINIVPDENYTIKDGFNLKGANLSTNFNGQNTEINSRNFTRLKNF |
| | | TGLFEFYKLLCVRGIIPFKTKSLDEGYNKALNDLCIKVNNWDLFFSPSEDNFT |
| | | NDLDKVEEITADTNIEAAEENISLDLIQQYYLTFDFDNEPENISIENLSSDIIGQ |
| | | LEPMPNIERFPNGKKYELDKYTMFHYLRAQEFEHGDSRIILTNSAEEALLKP |
| | | NVAYTFFSSKYVKKINKAVEAFMFLNWAEELVYDFTDETNEVTTMDKIADI |
| | | TIIVPYIGPALNIGNMLSKGEFVEAIIFTGVVAMLEFIPEYALPVFGTFAIVSYI |
| | | ANKVLTVQTINNALSKRNEKWDEVYKYTVTNWLAKVNTQIDLIREKMKKA |
| | | LENQAEATKAIINYQYNQYTEEEKNNINFNIDDLSSKLNESINSAMININKFL |
| | | DQCSVSYLMNSMIPYAVKRLKDFDASVRDVLLKYIYDNRGTLVLQVDRLKD |
| | | EVNNTLSADIPFQLSKYVDNKKLLSTFTEYIKNIVNTSILSIVYKKDDLIDLSRY |
| | | GAKINIGDRVYYDSIDKNQIKLINLESSTIEVILKNAIVYNSMYENFSTSFWIKI |
| | | PKYFSKINLNNEYTIINCIENNSGWKVSLNYGEIIWTLQDNKQNIQRVVFKYS |
| | | QMVNISDYINRWIFVTITNNRLTKSKIYINGRLIDQKPISNLGNIHASNKIMF |
| | | KLDGCRDPRRYIMIKYFNLFDKELNEKEIKDLYDSQSNSGILKDFWGNYLQY |
| | | DKPYYMLNLFDPNKYVDVNNIGIRGYMYLKGPRGSVVTTNIYLNSTLYEGT |
| | | KFIIKKYASGNEDNIVRNNDRVYINVVVKNKEYRLATNASQAGVEKILSALEI |
| | | PDVGNLSQVVVMKSKDDQGIRNKCKMNLQDNNGNDIGFIGFHLYDNIAK |
| | | LVASNWYNRQVGKASRTFGCSWEFIPVDDGWGESSL |
| 37 | BoNT/A2-K289R | MPFVNKQFNYKDPVNGVDIAYIKIPNAGQMQPVKAFKIHNKIWVIPERDT |
| | | FTNPEEGDLNPPPEAKQVPVSYYDSTYLSTDNEKDNYLKGVTKLFERIYSTDL |
| | | GRMLLTSIVRGIPFWGGSTIDTELKVIDTNCINVIQPDGSYRSEELNLVIIGPS |
| | | ADIIQFECKSFGHDVLNLTRNGYGSTQYIRFSPDFTFGFEESLEVDTNPLLGA |
| | | GKFATDPAVTLAHELIHAEHRLYGIAINPNRVFKVNTNAYYEMSGLEVSFEE |
| | | LRTFGGHDAKFIDSLQENEFRLYYYNRFKDVASTLNKAKSIIGTTASLQYMK |
| | | NVFKEKYLLSEDTSGKFSVDKLKFDKLYKMLTEIYTEDNFVNFFKVINRKTYL |
| | | NFDKAVFRINIVPDENYTIKDGFNLKGANLSTNFNGQNTEINSRNFTRLKNF |
| | | TGLFEFYKLLCVRGIIPFKTKSLDEGYNKALNDLCIKVNNWDLFFSPSEDNFT |
| | | NDLDKVEEITADTNIEAAEENISLDLIQQYYLTFDFDNEPENISIENLSSDIIGQ |
| | | LEPMPNIERFPNGKKYELDKYTMFHYLRAQEFEHGDSRIILTNSAEEALLKP |
| | | NVAYTFFSSKYVKKINKAVEAFMFLNWAEELVYDFTDETNEVTTMDKIADI |
| | | TIIVPYIGPALNIGNMLSKGEFVEAIIFTGVVAMLEFIPEYALPVFGTFAIVSYI |
| | | ANKVLTVQTINNALSKRNEKWDEVYKYTVTNWLAKVNTQIDLIREKMKKA |
| | | LENQAEATKAIINYQYNQYTEEEKNNINFNIDDLSSKLNESINSAMININKFL |
| | | DQCSVSYLMNSMIPYAVKRLKDFDASVRDVLLKYIYDNRGTLVLQVDRLKD |
| | | EVNNTLSADIPFQLSKYVDNKKLLSTFTEYIKNIVNTSILSIVYKKDDLIDLSRY |
| | | GAKINIGDRVYYDSIDKNQIKLINLESSTIEVILKNAIVYNSMYENFSTSFWIKI |
| | | PKYFSKINLNNEYTIINCIENNSGWKVSLNYGEIIWTLQDNKQNIQRVVFKYS |
| | | QMVNISDYINRWIFVTITNNRLTKSKIYINGRLIDQKPISNLGNIHASNKIMF |
| | | KLDGCRDPRRYIMIKYFNLFDKELNEKEIKDLYDSQSNSGILKDFWGNYLQY |
| | | DKPYYMLNLFDPNKYVDVNNIGIRGYMYLKGPRGSVVTTNIYLNSTLYEGT |
| | | KFIIKKYASGNEDNIVRNNDRVYINVVVKNKEYRLATNASQAGVEKILSALEI |
| | | PDVGNLSQVVVMKSKDDQGIRNKCKMNLQDNNGNDIGFIGFHLYDNIAK |
| | | LVASNWYNRQVGKASRTFGCSWEFIPVDDGWGESSL |
| 38 | BoNT/A2-K291R | MPFVNKQFNYKDPVNGVDIAYIKIPNAGQMQPVKAFKIHNKIWVIPERDT |
| | | FTNPEEGDLNPPPEAKQVPVSYYDSTYLSTDNEKDNYLKGVTKLFERIYSTDL |
| | | GRMLLTSIVRGIPFWGGSTIDTELKVIDTNCINVIQPDGSYRSEELNLVIIGPS |
| | | ADIIQFECKSFGHDVLNLTRNGYGSTQYIRFSPDFTFGFEESLEVDTNPLLGA |
| | | GKFATDPAVTLAHELIHAEHRLYGIAINPNRVFKVNTNAYYEMSGLEVSFEE |
| | | LRTFGGHDAKFIDSLQENEFRLYYYNKFRDVASTLNKAKSIIGTTASLQYMK |
| | | NVFKEKYLLSEDTSGKFSVDKLKFDKLYKMLTEIYTEDNFVNFFKVINRKTYL |
| | | NFDKAVFRINIVPDENYTIKDGFNLKGANLSTNFNGQNTEINSRNFTRLKNF |
| | | TGLFEFYKLLCVRGIIPFKTKSLDEGYNKALNDLCIKVNNWDLFFSPSEDNFT |
| | | NDLDKVEEITADTNIEAAEENISLDLIQQYYLTFDFDNEPENISIENLSSDIIGQ |
| | | LEPMPNIERFPNGKKYELDKYTMFHYLRAQEFEHGDSRIILTNSAEEALLKP |
| | | NVAYTFFSSKYVKKINKAVEAFMFLNWAEELVYDFTDETNEVTTMDKIADI |
| | | TIIVPYIGPALNIGNMLSKGEFVEAIIFTGVVAMLEFIPEYALPVFGTFAIVSYI |
| | | ANKVLTVQTINNALSKRNEKWDEVYKYTVTNWLAKVNTQIDLIREKMKKA |
| | | LENQAEATKAIINYQYNQYTEEEKNNINFNIDDLSSKLNESINSAMININKFL |
| | | DQCSVSYLMNSMIPYAVKRLKDFDASVRDVLLKYIYDNRGTLVLQVDRLKD |
| | | EVNNTLSADIPFQLSKYVDNKKLLSTFTEYIKNIVNTSILSIVYKKDDLIDLSRY |
| | | GAKINIGDRVYYDSIDKNQIKLINLESSTIEVILKNAIVYNSMYENFSTSFWIKI |
| | | PKYFSKINLNNEYTIINCIENNSGWKVSLNYGEIIWTLQDNKQNIQRVVFKYS |
| | | QMVNISDYINRWIFVTITNNRLTKSKIYINGRLIDQKPISNLGNIHASNKIMF |
| | | KLDGCRDPRRYIMIKYFNLFDKELNEKEIKDLYDSQSNSGILKDFWGNYLQY |
| | | DKPYYMLNLFDPNKYVDVNNIGIRGYMYLKGPRGSVVTTNIYLNSTLYEGT |
| | | KFIIKKYASGNEDNIVRNNDRVYINVVVKNKEYRLATNASQAGVEKILSALEI |
| | | PDVGNLSQVVVMKSKDDQGIRNKCKMNLQDNNGNDIGFIGFHLYDNIAK |
| | | LVASNWYNRQVGKASRTFGCSWEFIPVDDGWGESSL |
| 39 | BoNT/A2-K299R | MPFVNKQFNYKDPVNGVDIAYIKIPNAGQMQPVKAFKIHNKIWVIPERDT |
| | | FTNPEEGDLNPPPEAKQVPVSYYDSTYLSTDNEKDNYLKGVTKLFERIYSTDL |
| | | GRMLLTSIVRGIPFWGGSTIDTELKVIDTNCINVIQPDGSYRSEELNLVIIGPS |
| | | ADIIQFECKSFGHDVLNLTRNGYGSTQYIRFSPDFTFGFEESLEVDTNPLLGA |
| | | GKFATDPAVTLAHELIHAEHRLYGIAINPNRVFKVNTNAYYEMSGLEVSFEE |
| | | LRTFGGHDAKFIDSLQENEFRLYYYNKFKDVASTLNRAKSIIGTTASLQYMK |
| | | NVFKEKYLLSEDTSGKFSVDKLKFDKLYKMLTEIYTEDNFVNFFKVINRKTYL |
| | | NFDKAVFRINIVPDENYTIKDGFNLKGANLSTNFNGQNTEINSRNFTRLKNF |
| | | TGLFEFYKLLCVRGIIPFKTKSLDEGYNKALNDLCIKVNNWDLFFSPSEDNFT |
| | | NDLDKVEEITADTNIEAAEENISLDLIQQYYLTFDFDNEPENISIENLSSDIIGQ |
| | | LEPMPNIERFPNGKKYELDKYTMFHYLRAQEFEHGDSRIILTNSAEEALLKP |
| | | NVAYTFFSSKYVKKINKAVEAFMFLNWAEELVYDFTDETNEVTTMDKIADI |
| | | TIIVPYIGPALNIGNMLSKGEFVEAIIFTGVVAMLEFIPEYALPVFGTFAIVSYI |
| | | ANKVLTVQTINNALSKRNEKWDEVYKYTVTNWLAKVNTQIDLIREKMKKA |
| | | LENQAEATKAIINYQYNQYTEEEKNNINFNIDDLSSKLNESINSAMININKFL |
| | | DQCSVSYLMNSMIPYAVKRLKDFDASVRDVLLKYIYDNRGTLVLQVDRLKD |
| | | EVNNTLSADIPFQLSKYVDNKKLLSTFTEYIKNIVNTSILSIVYKKDDLIDLSRY |
| | | GAKINIGDRVYYDSIDKNQIKLINLESSTIEVILKNAIVYNSMYENFSTSFWIKI |
| | | PKYFSKINLNNEYTIINCIENNSGWKVSLNYGEIIWTLQDNKQNIQRVVFKYS |
| | | QMVNISDYINRWIFVTITNNRLTKSKIYINGRLIDQKPISNLGNIHASNKIMF |
| | | KLDGCRDPRRYIMIKYFNLFDKELNEKEIKDLYDSQSNSGILKDFWGNYLQY |
| | | DKPYYMLNLFDPNKYVDVNNIGIRGYMYLKGPRGSVVTTNIYLNSTLYEGT |
| | | KFIIKKYASGNEDNIVRNNDRVYINVVVKNKEYRLATNASQAGVEKILSALEI |
| | | PDVGNLSQVVVMKSKDDQGIRNKCKMNLQDNNGNDIGFIGFHLYDNIAK |
| | | LVASNWYNRQVGKASRTFGCSWEFIPVDDGWGESSL |
| 40 | BoNT/A2-K335R | MPFVNKQFNYKDPVNGVDIAYIKIPNAGQMQPVKAFKIHNKIWVIPERDT |
| | | FTNPEEGDLNPPPEAKQVPVSYYDSTYLSTDNEKDNYLKGVTKLFERIYSTDL |
| | | GRMLLTSIVRGIPFWGGSTIDTELKVIDTNCINVIQPDGSYRSEELNLVIIGPS |
| | | ADIIQFECKSFGHDVLNLTRNGYGSTQYIRFSPDFTFGFEESLEVDTNPLLGA |
| | | GKFATDPAVTLAHELIHAEHRLYGIAINPNRVFKVNTNAYYEMSGLEVSFEE |
| | | LRTFGGHDAKFIDSLQENEFRLYYYNKFKDVASTLNKAKSIIGTTASLQYMK |
| | | NVFKEKYLLSEDTSGKFSVDRLKFDKLYKMLTEIYTEDNFVNFFKVINRKTYL |
| | | NFDKAVFRINIVPDENYTIKDGFNLKGANLSTNFNGQNTEINSRNFTRLKNF |
| | | TGLFEFYKLLCVRGIIPFKTKSLDEGYNKALNDLCIKVNNWDLFFSPSEDNFT |
| | | NDLDKVEEITADTNIEAAEENISLDLIQQYYLTFDFDNEPENISIENLSSDIIGQ |
| | | LEPMPNIERFPNGKKYELDKYTMFHYLRAQEFEHGDSRIILTNSAEEALLKP |
| | | NVAYTFFSSKYVKKINKAVEAFMFLNWAEELVYDFTDETNEVTTMDKIADI |
| | | TIIVPYIGPALNIGNMLSKGEFVEAIIFTGVVAMLEFIPEYALPVFGTFAIVSYI |
| | | ANKVLTVQTINNALSKRNEKWDEVYKYTVTNWLAKVNTQIDLIREKMKKA |
| | | LENQAEATKAIINYQYNQYTEEEKNNINFNIDDLSSKLNESINSAMININKFL |
| | | DQCSVSYLMNSMIPYAVKRLKDFDASVRDVLLKYIYDNRGTLVLQVDRLKD |
| | | EVNNTLSADIPFQLSKYVDNKKLLSTFTEYIKNIVNTSILSIVYKKDDLIDLSRY |
| | | GAKINIGDRVYYDSIDKNQIKLINLESSTIEVILKNAIVYNSMYENFSTSFWIKI |
| | | PKYFSKINLNNEYTIINCIENNSGWKVSLNYGEIIWTLQDNKQNIQRVVFKYS |
| | | QMVNISDYINRWIFVTITNNRLTKSKIYINGRLIDQKPISNLGNIHASNKIMF |
| | | KLDGCRDPRRYIMIKYFNLFDKELNEKEIKDLYDSQSNSGILKDFWGNYLQY |
| | | DKPYYMLNLFDPNKYVDVNNIGIRGYMYLKGPRGSVVTTNIYLNSTLYEGT |
| | | KFIIKKYASGNEDNIVRNNDRVYINVVVKNKEYRLATNASQAGVEKILSALEI |
| | | PDVGNLSQVVVMKSKDDQGIRNKCKMNLQDNNGNDIGFIGFHLYDNIAK |
| | | LVASNWYNRQVGKASRTFGCSWEFIPVDDGWGESSL |
| 41 | BoNT/A2-K337R | MPFVNKQFNYKDPVNGVDIAYIKIPNAGQMQPVKAFKIHNKIWVIPERDT |
| | | FTNPEEGDLNPPPEAKQVPVSYYDSTYLSTDNEKDNYLKGVTKLFERIYSTDL |
| | | GRMLLTSIVRGIPFWGGSTIDTELKVIDTNCINVIQPDGSYRSEELNLVIIGPS |
| | | ADIIQFECKSFGHDVLNLTRNGYGSTQYIRFSPDFTFGFEESLEVDTNPLLGA |
| | | GKFATDPAVTLAHELIHAEHRLYGIAINPNRVFKVNTNAYYEMSGLEVSFEE |
| | | LRTFGGHDAKFIDSLQENEFRLYYYNKFKDVASTLNKAKSIIGTTASLQYMK |
| | | NVFKEKYLLSEDTSGKFSVDKLRFDKLYKMLTEIYTEDNFVNFFKVINRKTYL |
| | | NFDKAVFRINIVPDENYTIKDGFNLKGANLSTNFNGQNTEINSRNFTRLKNF |
| | | TGLFEFYKLLCVRGIIPFKTKSLDEGYNKALNDLCIKVNNWDLFFSPSEDNFT |
| | | NDLDKVEEITADTNIEAAEENISLDLIQQYYLTFDFDNEPENISIENLSSDIIGQ |
| | | LEPMPNIERFPNGKKYELDKYTMFHYLRAQEFEHGDSRIILTNSAEEALLKP |
| | | NVAYTFFSSKYVKKINKAVEAFMFLNWAEELVYDFTDETNEVTTMDKIADI |
| | | TIIVPYIGPALNIGNMLSKGEFVEAIIFTGVVAMLEFIPEYALPVFGTFAIVSYI |
| | | ANKVLTVQTINNALSKRNEKWDEVYKYTVTNWLAKVNTQIDLIREKMKKA |
| | | LENQAEATKAIINYQYNQYTEEEKNNINFNIDDLSSKLNESINSAMININKFL |
| | | DQCSVSYLMNSMIPYAVKRLKDFDASVRDVLLKYIYDNRGTLVLQVDRLKD |
| | | EVNNTLSADIPFQLSKYVDNKKLLSTFTEYIKNIVNTSILSIVYKKDDLIDLSRY |
| | | GAKINIGDRVYYDSIDKNQIKLINLESSTIEVILKNAIVYNSMYENFSTSFWIKI |
| | | PKYFSKINLNNEYTIINCIENNSGWKVSLNYGEIIWTLQDNKQNIQRVVFKYS |
| | | QMVNISDYINRWIFVTITNNRLTKSKIYINGRLIDQKPISNLGNIHASNKIMF |
| | | KLDGCRDPRRYIMIKYFNLFDKELNEKEIKDLYDSQSNSGILKDFWGNYLQY |
| | | DKPYYMLNLFDPNKYVDVNNIGIRGYMYLKGPRGSVVTTNIYLNSTLYEGT |
| | | KFIIKKYASGNEDNIVRNNDRVYINVVVKNKEYRLATNASQAGVEKILSALEI |
| | | PDVGNLSQVVVMKSKDDQGIRNKCKMNLQDNNGNDIGFIGFHLYDNIAK |
| | | LVASNWYNRQVGKASRTFGCSWEFIPVDDGWGESSL |
| 42 | BoNT/A2-K343R | MPFVNKQFNYKDPVNGVDIAYIKIPNAGQMQPVKAFKIHNKIWVIPERDT |
| | | FTNPEEGDLNPPPEAKQVPVSYYDSTYLSTDNEKDNYLKGVTKLFERIYSTDL |
| | | GRMLLTSIVRGIPFWGGSTIDTELKVIDTNCINVIQPDGSYRSEELNLVIIGPS |
| | | ADIIQFECKSFGHDVLNLTRNGYGSTQYIRFSPDFTFGFEESLEVDTNPLLGA |
| | | GKFATDPAVTLAHELIHAEHRLYGIAINPNRVFKVNTNAYYEMSGLEVSFEE |
| | | LRTFGGHDAKFIDSLQENEFRLYYYNKFKDVASTLNKAKSIIGTTASLQYMK |
| | | NVFKEKYLLSEDTSGKFSVDKLKFDKLYRMLTEIYTEDNFVNFFKVINRKTYL |
| | | NFDKAVFRINIVPDENYTIKDGFNLKGANLSTNFNGQNTEINSRNFTRLKNF |
| | | TGLFEFYKLLCVRGIIPFKTKSLDEGYNKALNDLCIKVNNWDLFFSPSEDNFT |
| | | NDLDKVEEITADTNIEAAEENISLDLIQQYYLTFDFDNEPENISIENLSSDIIGQ |
| | | LEPMPNIERFPNGKKYELDKYTMFHYLRAQEFEHGDSRIILTNSAEEALLKP |
| | | NVAYTFFSSKYVKKINKAVEAFMFLNWAEELVYDFTDETNEVTTMDKIADI |
| | | TIIVPYIGPALNIGNMLSKGEFVEAIIFTGVVAMLEFIPEYALPVFGTFAIVSYI |
| | | ANKVLTVQTINNALSKRNEKWDEVYKYTVTNWLAKVNTQIDLIREKMKKA |
| | | LENQAEATKAIINYQYNQYTEEEKNNINFNIDDLSSKLNESINSAMININKFL |
| | | DQCSVSYLMNSMIPYAVKRLKDFDASVRDVLLKYIYDNRGTLVLQVDRLKD |
| | | EVNNTLSADIPFQLSKYVDNKKLLSTFTEYIKNIVNTSILSIVYKKDDLIDLSRY |
| | | GAKINIGDRVYYDSIDKNQIKLINLESSTIEVILKNAIVYNSMYENFSTSFWIKI |
| | | PKYFSKINLNNEYTIINCIENNSGWKVSLNYGEIIWTLQDNKQNIQRVVFKYS |
| | | QMVNISDYINRWIFVTITNNRLTKSKIYINGRLIDQKPISNLGNIHASNKIMF |
| | | KLDGCRDPRRYIMIKYFNLFDKELNEKEIKDLYDSQSNSGILKDFWGNYLQY |
| | | DKPYYMLNLFDPNKYVDVNNIGIRGYMYLKGPRGSVVTTNIYLNSTLYEGT |
| | | KFIIKKYASGNEDNIVRNNDRVYINVVVKNKEYRLATNASQAGVEKILSALEI |
| | | PDVGNLSQVVVMKSKDDQGIRNKCKMNLQDNNGNDIGFIGFHLYDNIAK |
| | | LVASNWYNRQVGKASRTFGCSWEFIPVDDGWGESSL |
| 43 | BoNT/A2-KR7 (K11R, | MPFVNKQFNYRDPVNGVDIAYIKIPNAGQMQPVKAFKIHNKIWVIPERDT |
| | K289R, K291R, K299R, | FTNPEEGDLNPPPEAKQVPVSYYDSTYLSTDNEKDNYLKGVTKLFERIYSTDL |
| | K335R, K337R, K343R) | GRMLLTSIVRGIPFWGGSTIDTELKVIDTNCINVIQPDGSYRSEELNLVIIGPS |
| | | ADIIQFECKSFGHDVLNLTRNGYGSTQYIRFSPDFTFGFEESLEVDTNPLLGA |
| | | GKFATDPAVTLAHELIHAEHRLYGIAINPNRVFKVNTNAYYEMSGLEVSFEE |
| | | LRTFGGHDAKFIDSLQENEFRLYYYNRFRDVASTLNRAKSIIGTTASLQYMK |
| | | NVFKEKYLLSEDTSGKFSVDRLRFDKLYRMLTEIYTEDNFVNFFKVINRKTYL |
| | | NFDKAVFRINIVPDENYTIKDGFNLKGANLSTNFNGQNTEINSRNFTRLKNF |
| | | TGLFEFYKLLCVRGIIPFKTKSLDEGYNKALNDLCIKVNNWDLFFSPSEDNFT |
| | | NDLDKVEEITADTNIEAAEENISLDLIQQYYLTFDFDNEPENISIENLSSDIIGQ |
| | | LEPMPNIERFPNGKKYELDKYTMFHYLRAQEFEHGDSRIILTNSAEEALLKP |
| | | NVAYTFFSSKYVKKINKAVEAFMFLNWAEELVYDFTDETNEVTTMDKIADI |
| | | TIIVPYIGPALNIGNMLSKGEFVEAIIFTGVVAMLEFIPEYALPVFGTFAIVSYI |
| | | ANKVLTVQTINNALSKRNEKWDEVYKYTVTNWLAKVNTQIDLIREKMKKA |
| | | LENQAEATKAIINYQYNQYTEEEKNNINFNIDDLSSKLNESINSAMININKFL |
| | | DQCSVSYLMNSMIPYAVKRLKDFDASVRDVLLKYIYDNRGTLVLQVDRLKD |
| | | EVNNTLSADIPFQLSKYVDNKKLLSTFTEYIKNIVNTSILSIVYKKDDLIDLSRY |
| | | GAKINIGDRVYYDSIDKNQIKLINLESSTIEVILKNAIVYNSMYENFSTSFWIKI |
| | | PKYFSKINLNNEYTIINCIENNSGWKVSLNYGEIIWTLQDNKQNIQRVVFKYS |
| | | QMVNISDYINRWIFVTITNNRLTKSKIYINGRLIDQKPISNLGNIHASNKIMF |
| | | KLDGCRDPRRYIMIKYFNLFDKELNEKEIKDLYDSQSNSGILKDFWGNYLQY |
| | | DKPYYMLNLFDPNKYVDVNNIGIRGYMYLKGPRGSVVTTNIYLNSTLYEGT |
| | | KFIIKKYASGNEDNIVRNNDRVYINVVVKNKEYRLATNASQAGVEKILSALEI |
| | | PDVGNLSQVVVMKSKDDQGIRNKCKMNLQDNNGNDIGFIGFHLYDNIAK |
| | | LVASNWYNRQVGKASRTFGCSWEFIPVDDGWGESSL |
| 44 | LC-Hn BoNT/A1-WT | MPFVNKQFNYKDPVNGVDIAYIKIPNAGQMQPVKAFKIHNKIWVIPERDT |
| | | FTNPEEGDLNPPPEAKQVPVSYYDSTYLSTDNEKDNYLKGVTKLFERIYSTDL |
| | | GRMLLTSIVRGIPFWGGSTIDTELKVIDTNCINVIQPDGSYRSEELNLVIIGPS |
| | | ADIIQFECKSFGHEVLNLTRNGYGSTQYIRFSPDFTFGFEESLEVDTNPLLGA |
| | | GKFATDPAVTLAHELIHAGHRLYGIAINPNRVFKVNTNAYYEMSGLEVSFEE |
| | | LRTFGGHDAKFIDSLQENEFRLYYYNKFKDIASTLNKAKSIVGTTASLQYMK |
| | | NVFKEKYLLSEDTSGKFSVDKLKFDKLYKMLTEIYTEDNFVKFFKVLNRKTYL |
| | | NFDKAVFKINIVPKVNYTIYDGFNLRNTNLAANFNGQNTEINNMNFTKLKN |
| | | FTGLFEFYKLLCVRGIITSKTKSLDKGYNKALNDLCIKVNNWDLFFSPSEDNF |
| | | TNDLNKGEEITSDTNIEAAEENISLDLIQQYYLTFNFDNEPENISIENLSSDIIG |
| | | QLELMPNIERFPNGKKYELDKYTMFHYLRAQEFEHGKSRIALTNSVNEALLN |
| | | PSRVYTFFSSDYVKKVNKATEAAMFLGWVEQLVYDFTDETSEVSTTDKIADI |
| | | TIIIPYIGPALNIGNMLYKDDFVGALIFSGAVILLEFIPEIAIPVLGTFALVSYIAN |
| | | KVLTVQTIDNALSKRNEKWDEVYKYIVTNWLAKVNTQIDLIRKKMKEALEN |
| | | QAEATKAIINYQYNQYTEEEKNNINFNIDDLSSKLNESINKAMININKFLNQC |
| | | SVSYLMNSMIPYGVKRLEDFDASLKDALLKYIYDNRGTLIGQVDRLKDKVN |
| | | NTLSTDIPFQLSKYVDNQRLLSTFTEYIKN |
| 45 | LC-Hn BoNT/A1-K11R | MPFVNKQFNYRDPVNGVDIAYIKIPNAGQMQPVKAFKIHNKIWVIPERDT |
| | | FTNPEEGDLNPPPEAKQVPVSYYDSTYLSTDNEKDNYLKGVTKLFERIYSTDL |
| | | GRMLLTSIVRGIPFWGGSTIDTELKVIDTNCINVIQPDGSYRSEELNLVIIGPS |
| | | ADIIQFECKSFGHEVLNLTRNGYGSTQYIRFSPDFTFGFEESLEVDTNPLLGA |
| | | GKFATDPAVTLAHELIHAGHRLYGIAINPNRVFKVNTNAYYEMSGLEVSFEE |
| | | LRTFGGHDAKFIDSLQENEFRLYYYNKFKDIASTLNKAKSIVGTTASLQYMK |
| | | NVFKEKYLLSEDTSGKFSVDKLKFDKLYKMLTEIYTEDNFVKFFKVLNRKTYL |
| | | NFDKAVFKINIVPKVNYTIYDGFNLRNTNLAANFNGQNTEINNMNFTKLKN |
| | | FTGLFEFYKLLCVRGIITSKTKSLDKGYNKALNDLCIKVNNWDLFFSPSEDNF |
| | | TNDLNKGEEITSDTNIEAAEENISLDLIQQYYLTFNFDNEPENISIENLSSDIIG |
| | | QLELMPNIERFPNGKKYELDKYTMFHYLRAQEFEHGKSRIALTNSVNEALLN |
| | | PSRVYTFFSSDYVKKVNKATEAAMFLGWVEQLVYDFTDETSEVSTTDKIADI |
| | | TIIIPYIGPALNIGNMLYKDDFVGALIFSGAVILLEFIPEIAIPVLGTFALVSYIAN |
| | | KVLTVQTIDNALSKRNEKWDEVYKYIVTNWLAKVNTQIDLIRKKMKEALEN |
| | | QAEATKAIINYQYNQYTEEEKNNINFNIDDLSSKLNESINKAMININKFLNQC |
| | | SVSYLMNSMIPYGVKRLEDFDASLKDALLKYIYDNRGTLIGQVDRLKDKVN |
| | | NTLSTDIPFQLSKYVDNQRLLSTFTEYIKN |
| 46 | LC-Hn BoNT/A1-K41R | MPFVNKQFNYKDPVNGVDIAYIKIPNAGQMQPVKAFKIHNRIWVIPERDT |
| | | FTNPEEGDLNPPPEAKQVPVSYYDSTYLSTDNEKDNYLKGVTKLFERIYSTDL |
| | | GRMLLTSIVRGIPFWGGSTIDTELKVIDTNCINVIQPDGSYRSEELNLVIIGPS |
| | | ADIIQFECKSFGHEVLNLTRNGYGSTQYIRFSPDFTFGFEESLEVDTNPLLGA |
| | | GKFATDPAVTLAHELIHAGHRLYGIAINPNRVFKVNTNAYYEMSGLEVSFEE |
| | | LRTFGGHDAKFIDSLQENEFRLYYYNKFKDIASTLNKAKSIVGTTASLQYMK |
| | | NVFKEKYLLSEDTSGKFSVDKLKFDKLYKMLTEIYTEDNFVKFFKVLNRKTYL |
| | | NFDKAVFKINIVPKVNYTIYDGFNLRNTNLAANFNGQNTEINNMNFTKLKN |
| | | FTGLFEFYKLLCVRGIITSKTKSLDKGYNKALNDLCIKVNNWDLFFSPSEDNF |
| | | TNDLNKGEEITSDTNIEAAEENISLDLIQQYYLTFNFDNEPENISIENLSSDIIG |
| | | QLELMPNIERFPNGKKYELDKYTMFHYLRAQEFEHGKSRIALTNSVNEALLN |
| | | PSRVYTFFSSDYVKKVNKATEAAMFLGWVEQLVYDFTDETSEVSTTDKIADI |
| | | TIIIPYIGPALNIGNMLYKDDFVGALIFSGAVILLEFIPEIAIPVLGTFALVSYIAN |
| | | KVLTVQTIDNALSKRNEKWDEVYKYIVTNWLAKVNTQIDLIRKKMKEALEN |
| | | QAEATKAIINYQYNQYTEEEKNNINFNIDDLSSKLNESINKAMININKFLNQC |
| | | SVSYLMNSMIPYGVKRLEDFDASLKDALLKYIYDNRGTLIGQVDRLKDKVN |
| | | NTLSTDIPFQLSKYVDNQRLLSTFTEYIKN |
| 47 | LC-Hn BoNT/A1- | MPFVNKQFNYKDPVNGVDIAYIKIPNAGQMQPVKAFKIHNKIWVIPERDT |
| | K212R | FTNPEEGDLNPPPEAKQVPVSYYDSTYLSTDNEKDNYLKGVTKLFERIYSTDL |
| | | GRMLLTSIVRGIPFWGGSTIDTELKVIDTNCINVIQPDGSYRSEELNLVIIGPS |
| | | ADIIQFECKSFGHEVLNLTRNGYGSTQYIRFSPDFTFGFEESLEVDTNPLLGA |
| | | GRFATDPAVTLAHELIHAGHRLYGIAINPNRVFKVNTNAYYEMSGLEVSFEE |
| | | LRTFGGHDAKFIDSLQENEFRLYYYNKFKDIASTLNKAKSIVGTTASLQYMK |
| | | NVFKEKYLLSEDTSGKFSVDKLKFDKLYKMLTEIYTEDNFVKFFKVLNRKTYL |
| | | NFDKAVFKINIVPKVNYTIYDGFNLRNTNLAANFNGQNTEINNMNFTKLKN |
| | | FTGLFEFYKLLCVRGIITSKTKSLDKGYNKALNDLCIKVNNWDLFFSPSEDNF |
| | | TNDLNKGEEITSDTNIEAAEENISLDLIQQYYLTFNFDNEPENISIENLSSDIIG |
| | | QLELMPNIERFPNGKKYELDKYTMFHYLRAQEFEHGKSRIALTNSVNEALLN |
| | | PSRVYTFFSSDYVKKVNKATEAAMFLGWVEQLVYDFTDETSEVSTTDKIADI |
| | | TIIIPYIGPALNIGNMLYKDDFVGALIFSGAVILLEFIPEIAIPVLGTFALVSYIAN |
| | | KVLTVQTIDNALSKRNEKWDEVYKYIVTNWLAKVNTQIDLIRKKMKEALEN |
| | | QAEATKAIINYQYNQYTEEEKNNINFNIDDLSSKLNESINKAMININKFLNQC |
| | | SVSYLMNSMIPYGVKRLEDFDASLKDALLKYIYDNRGTLIGQVDRLKDKVN |
| | | NTLSTDIPFQLSKYVDNQRLLSTFTEYIKN |
| 48 | LC-Hn BoNT/A1- | MPFVNKQFNYKDPVNGVDIAYIKIPNAGQMQPVKAFKIHNKIWVIPERDT |
| | K272R | FTNPEEGDLNPPPEAKQVPVSYYDSTYLSTDNEKDNYLKGVTKLFERIYSTDL |
| | | GRMLLTSIVRGIPFWGGSTIDTELKVIDTNCINVIQPDGSYRSEELNLVIIGPS |
| | | ADIIQFECKSFGHEVLNLTRNGYGSTQYIRFSPDFTFGFEESLEVDTNPLLGA |
| | | GKFATDPAVTLAHELIHAGHRLYGIAINPNRVFKVNTNAYYEMSGLEVSFEE |
| | | LRTFGGHDARFIDSLQENEFRLYYYNKFKDIASTLNKAKSIVGTTASLQYMK |
| | | NVFKEKYLLSEDTSGKFSVDKLKFDKLYKMLTEIYTEDNFVKFFKVLNRKTYL |
| | | NFDKAVFKINIVPKVNYTIYDGFNLRNTNLAANFNGQNTEINNMNFTKLKN |
| | | FTGLFEFYKLLCVRGIITSKTKSLDKGYNKALNDLCIKVNNWDLFFSPSEDNF |
| | | TNDLNKGEEITSDTNIEAAEENISLDLIQQYYLTFNFDNEPENISIENLSSDIIG |
| | | QLELMPNIERFPNGKKYELDKYTMFHYLRAQEFEHGKSRIALTNSVNEALLN |
| | | PSRVYTFFSSDYVKKVNKATEAAMFLGWVEQLVYDFTDETSEVSTTDKIADI |
| | | TIIIPYIGPALNIGNMLYKDDFVGALIFSGAVILLEFIPEIAIPVLGTFALVSYIAN |
| | | KVLTVQTIDNALSKRNEKWDEVYKYIVTNWLAKVNTQIDLIRKKMKEALEN |
| | | QAEATKAIINYQYNQYTEEEKNNINFNIDDLSSKLNESINKAMININKFLNQC |
| | | SVSYLMNSMIPYGVKRLEDFDASLKDALLKYIYDNRGTLIGQVDRLKDKVN |
| | | NTLSTDIPFQLSKYVDNQRLLSTFTEYIKN |
| 49 | LC-Hn BoNT/A1- | MPFVNKQFNYKDPVNGVDIAYIKIPNAGQMQPVKAFKIHNKIWVIPERDT |
| | K289R | FTNPEEGDLNPPPEAKQVPVSYYDSTYLSTDNEKDNYLKGVTKLFERIYSTDL |
| | | GRMLLTSIVRGIPFWGGSTIDTELKVIDTNCINVIQPDGSYRSEELNLVIIGPS |
| | | ADIIQFECKSFGHEVLNLTRNGYGSTQYIRFSPDFTFGFEESLEVDTNPLLGA |
| | | GKFATDPAVTLAHELIHAGHRLYGIAINPNRVFKVNTNAYYEMSGLEVSFEE |
| | | LRTFGGHDAKFIDSLQENEFRLYYYNRFKDIASTLNKAKSIVGTTASLQYMK |
| | | NVFKEKYLLSEDTSGKFSVDKLKFDKLYKMLTEIYTEDNFVKFFKVLNRKTYL |
| | | NFDKAVFKINIVPKVNYTIYDGFNLRNTNLAANFNGQNTEINNMNFTKLKN |
| | | FTGLFEFYKLLCVRGIITSKTKSLDKGYNKALNDLCIKVNNWDLFFSPSEDNF |
| | | TNDLNKGEEITSDTNIEAAEENISLDLIQQYYLTFNFDNEPENISIENLSSDIIG |
| | | QLELMPNIERFPNGKKYELDKYTMFHYLRAQEFEHGKSRIALTNSVNEALLN |
| | | PSRVYTFFSSDYVKKVNKATEAAMFLGWVEQLVYDFTDETSEVSTTDKIADI |
| | | TIIIPYIGPALNIGNMLYKDDFVGALIFSGAVILLEFIPEIAIPVLGTFALVSYIAN |
| | | KVLTVQTIDNALSKRNEKWDEVYKYIVTNWLAKVNTQIDLIRKKMKEALEN |
| | | QAEATKAIINYQYNQYTEEEKNNINFNIDDLSSKLNESINKAMININKFLNQC |
| | | SVSYLMNSMIPYGVKRLEDFDASLKDALLKYIYDNRGTLIGQVDRLKDKVN |
| | | NTLSTDIPFQLSKYVDNQRLLSTFTEYIKN |
| 50 | LC-Hn BoNT/A1- | MPFVNKQFNYKDPVNGVDIAYIKIPNAGQMQPVKAFKIHNKIWVIPERDT |
| | K291R | FTNPEEGDLNPPPEAKQVPVSYYDSTYLSTDNEKDNYLKGVTKLFERIYSTDL |
| | | GRMLLTSIVRGIPFWGGSTIDTELKVIDTNCINVIQPDGSYRSEELNLVIIGPS |
| | | ADIIQFECKSFGHEVLNLTRNGYGSTQYIRFSPDFTFGFEESLEVDTNPLLGA |
| | | GKFATDPAVTLAHELIHAGHRLYGIAINPNRVFKVNTNAYYEMSGLEVSFEE |
| | | LRTFGGHDAKFIDSLQENEFRLYYYNKFRDIASTLNKAKSIVGTTASLQYMK |
| | | NVFKEKYLLSEDTSGKFSVDKLKFDKLYKMLTEIYTEDNFVKFFKVLNRKTYL |
| | | NFDKAVFKINIVPKVNYTIYDGFNLRNTNLAANFNGQNTEINNMNFTKLKN |
| | | FTGLFEFYKLLCVRGIITSKTKSLDKGYNKALNDLCIKVNNWDLFFSPSEDNF |
| | | TNDLNKGEEITSDTNIEAAEENISLDLIQQYYLTFNFDNEPENISIENLSSDIIG |
| | | QLELMPNIERFPNGKKYELDKYTMFHYLRAQEFEHGKSRIALTNSVNEALLN |
| | | PSRVYTFFSSDYVKKVNKATEAAMFLGWVEQLVYDFTDETSEVSTTDKIADI |
| | | TIIIPYIGPALNIGNMLYKDDFVGALIFSGAVILLEFIPEIAIPVLGTFALVSYIAN |
| | | KVLTVQTIDNALSKRNEKWDEVYKYIVTNWLAKVNTQIDLIRKKMKEALEN |
| | | QAEATKAIINYQYNQYTEEEKNNINFNIDDLSSKLNESINKAMININKFLNQC |
| | | SVSYLMNSMIPYGVKRLEDFDASLKDALLKYIYDNRGTLIGQVDRLKDKVN |
| | | NTLSTDIPFQLSKYVDNQRLLSTFTEYIKN |
| 51 | LC-Hn BoNT/A1- | MPFVNKQFNYKDPVNGVDIAYIKIPNAGQMQPVKAFKIHNKIWVIPERDT |
| | K299R | FTNPEEGDLNPPPEAKQVPVSYYDSTYLSTDNEKDNYLKGVTKLFERIYSTDL |
| | | GRMLLTSIVRGIPFWGGSTIDTELKVIDTNCINVIQPDGSYRSEELNLVIIGPS |
| | | ADIIQFECKSFGHEVLNLTRNGYGSTQYIRFSPDFTFGFEESLEVDTNPLLGA |
| | | GKFATDPAVTLAHELIHAGHRLYGIAINPNRVFKVNTNAYYEMSGLEVSFEE |
| | | LRTFGGHDAKFIDSLQENEFRLYYYNKFKDIASTLNRAKSIVGTTASLQYMK |
| | | NVFKEKYLLSEDTSGKFSVDKLKFDKLYKMLTEIYTEDNFVKFFKVLNRKTYL |
| | | NFDKAVFKINIVPKVNYTIYDGFNLRNTNLAANFNGQNTEINNMNFTKLKN |
| | | FTGLFEFYKLLCVRGIITSKTKSLDKGYNKALNDLCIKVNNWDLFFSPSEDNF |
| | | TNDLNKGEEITSDTNIEAAEENISLDLIQQYYLTFNFDNEPENISIENLSSDIIG |
| | | QLELMPNIERFPNGKKYELDKYTMFHYLRAQEFEHGKSRIALTNSVNEALLN |
| | | PSRVYTFFSSDYVKKVNKATEAAMFLGWVEQLVYDFTDETSEVSTTDKIADI |
| | | TIIIPYIGPALNIGNMLYKDDFVGALIFSGAVILLEFIPEIAIPVLGTFALVSYIAN |
| | | KVLTVQTIDNALSKRNEKWDEVYKYIVTNWLAKVNTQIDLIRKKMKEALEN |
| | | QAEATKAIINYQYNQYTEEEKNNINFNIDDLSSKLNESINKAMININKFLNQC |
| | | SVSYLMNSMIPYGVKRLEDFDASLKDALLKYIYDNRGTLIGQVDRLKDKVN |
| | | NTLSTDIPFQLSKYVDNQRLLSTFTEYIKN |
| 52 | LC-Hn BoNT/A1- | MPFVNKQFNYKDPVNGVDIAYIKIPNAGQMQPVKAFKIHNKIWVIPERDT |
| | K318R | FTNPEEGDLNPPPEAKQVPVSYYDSTYLSTDNEKDNYLKGVTKLFERIYSTDL |
| | | GRMLLTSIVRGIPFWGGSTIDTELKVIDTNCINVIQPDGSYRSEELNLVIIGPS |
| | | ADIIQFECKSFGHEVLNLTRNGYGSTQYIRFSPDFTFGFEESLEVDTNPLLGA |
| | | GKFATDPAVTLAHELIHAGHRLYGIAINPNRVFKVNTNAYYEMSGLEVSFEE |
| | | LRTFGGHDAKFIDSLQENEFRLYYYNKFKDIASTLNKAKSIVGTTASLQYMK |
| | | NVFREKYLLSEDTSGKFSVDKLKFDKLYKMLTEIYTEDNFVKFFKVLNRKTYL |
| | | NFDKAVFKINIVPKVNYTIYDGFNLRNTNLAANFNGQNTEINNMNFTKLKN |
| | | FTGLFEFYKLLCVRGIITSKTKSLDKGYNKALNDLCIKVNNWDLFFSPSEDNF |
| | | TNDLNKGEEITSDTNIEAAEENISLDLIQQYYLTFNFDNEPENISIENLSSDIIG |
| | | QLELMPNIERFPNGKKYELDKYTMFHYLRAQEFEHGKSRIALTNSVNEALLN |
| | | PSRVYTFFSSDYVKKVNKATEAAMFLGWVEQLVYDFTDETSEVSTTDKIADI |
| | | TIIIPYIGPALNIGNMLYKDDFVGALIFSGAVILLEFIPEIAIPVLGTFALVSYIAN |
| | | KVLTVQTIDNALSKRNEKWDEVYKYIVTNWLAKVNTQIDLIRKKMKEALEN |
| | | QAEATKAIINYQYNQYTEEEKNNINFNIDDLSSKLNESINKAMININKFLNQC |
| | | SVSYLMNSMIPYGVKRLEDFDASLKDALLKYIYDNRGTLIGQVDRLKDKVN |
| | | NTLSTDIPFQLSKYVDNQRLLSTFTEYIKN |
| 53 | LC-Hn BoNT/A1- | MPFVNKQFNYKDPVNGVDIAYIKIPNAGQMQPVKAFKIHNKIWVIPERDT |
| | K335R | FTNPEEGDLNPPPEAKQVPVSYYDSTYLSTDNEKDNYLKGVTKLFERIYSTDL |
| | | GRMLLTSIVRGIPFWGGSTIDTELKVIDTNCINVIQPDGSYRSEELNLVIIGPS |
| | | ADIIQFECKSFGHEVLNLTRNGYGSTQYIRFSPDFTFGFEESLEVDTNPLLGA |
| | | GKFATDPAVTLAHELIHAGHRLYGIAINPNRVFKVNTNAYYEMSGLEVSFEE |
| | | LRTFGGHDAKFIDSLQENEFRLYYYNKFKDIASTLNKAKSIVGTTASLQYMK |
| | | NVFKEKYLLSEDTSGKFSVDRLKFDKLYKMLTEIYTEDNFVKFFKVLNRKTYL |
| | | NFDKAVFKINIVPKVNYTIYDGFNLRNTNLAANFNGQNTEINNMNFTKLKN |
| | | FTGLFEFYKLLCVRGIITSKTKSLDKGYNKALNDLCIKVNNWDLFFSPSEDNF |
| | | TNDLNKGEEITSDTNIEAAEENISLDLIQQYYLTFNFDNEPENISIENLSSDIIG |
| | | QLELMPNIERFPNGKKYELDKYTMFHYLRAQEFEHGKSRIALTNSVNEALLN |
| | | PSRVYTFFSSDYVKKVNKATEAAMFLGWVEQLVYDFTDETSEVSTTDKIADI |
| | | TIIIPYIGPALNIGNMLYKDDFVGALIFSGAVILLEFIPEIAIPVLGTFALVSYIAN |
| | | KVLTVQTIDNALSKRNEKWDEVYKYIVTNWLAKVNTQIDLIRKKMKEALEN |
| | | QAEATKAIINYQYNQYTEEEKNNINFNIDDLSSKLNESINKAMININKFLNQC |
| | | SVSYLMNSMIPYGVKRLEDFDASLKDALLKYIYDNRGTLIGQVDRLKDKVN |
| | | NTLSTDIPFQLSKYVDNQRLLSTFTEYIKN |
| 54 | LC-Hn BoNT/A1- | MPFVNKQFNYKDPVNGVDIAYIKIPNAGQMQPVKAFKIHNKIWVIPERDT |
| | K337R | FTNPEEGDLNPPPEAKQVPVSYYDSTYLSTDNEKDNYLKGVTKLFERIYSTDL |
| | | GRMLLTSIVRGIPFWGGSTIDTELKVIDTNCINVIQPDGSYRSEELNLVIIGPS |
| | | ADIIQFECKSFGHEVLNLTRNGYGSTQYIRFSPDFTFGFEESLEVDTNPLLGA |
| | | GKFATDPAVTLAHELIHAGHRLYGIAINPNRVFKVNTNAYYEMSGLEVSFEE |
| | | LRTFGGHDAKFIDSLQENEFRLYYYNKFKDIASTLNKAKSIVGTTASLQYMK |
| | | NVFKEKYLLSEDTSGKFSVDKLRFDKLYKMLTEIYTEDNFVKFFKVLNRKTYL |
| | | NFDKAVFKINIVPKVNYTIYDGFNLRNTNLAANFNGQNTEINNMNFTKLKN |
| | | FTGLFEFYKLLCVRGIITSKTKSLDKGYNKALNDLCIKVNNWDLFFSPSEDNF |
| | | TNDLNKGEEITSDTNIEAAEENISLDLIQQYYLTFNFDNEPENISIENLSSDIIG |
| | | QLELMPNIERFPNGKKYELDKYTMFHYLRAQEFEHGKSRIALTNSVNEALLN |
| | | PSRVYTFFSSDYVKKVNKATEAAMFLGWVEQLVYDFTDETSEVSTTDKIADI |
| | | TIIIPYIGPALNIGNMLYKDDFVGALIFSGAVILLEFIPEIAIPVLGTFALVSYIAN |
| | | KVLTVQTIDNALSKRNEKWDEVYKYIVTNWLAKVNTQIDLIRKKMKEALEN |
| | | QAEATKAIINYQYNQYTEEEKNNINFNIDDLSSKLNESINKAMININKFLNQC |
| | | SVSYLMNSMIPYGVKRLEDFDASLKDALLKYIYDNRGTLIGQVDRLKDKVN |
| | | NTLSTDIPFQLSKYVDNQRLLSTFTEYIKN |
| 55 | LC-Hn BoNT/A1- | MPFVNKQFNYKDPVNGVDIAYIKIPNAGQMQPVKAFKIHNKIWVIPERDT |
| | K340R | FTNPEEGDLNPPPEAKQVPVSYYDSTYLSTDNEKDNYLKGVTKLFERIYSTDL |
| | | GRMLLTSIVRGIPFWGGSTIDTELKVIDTNCINVIQPDGSYRSEELNLVIIGPS |
| | | ADIIQFECKSFGHEVLNLTRNGYGSTQYIRFSPDFTFGFEESLEVDTNPLLGA |
| | | GKFATDPAVTLAHELIHAGHRLYGIAINPNRVFKVNTNAYYEMSGLEVSFEE |
| | | LRTFGGHDAKFIDSLQENEFRLYYYNKFKDIASTLNKAKSIVGTTASLQYMK |
| | | NVFKEKYLLSEDTSGKFSVDKLKFDRLYKMLTEIYTEDNFVKFFKVLNRKTYL |
| | | NFDKAVFKINIVPKVNYTIYDGFNLRNTNLAANFNGQNTEINNMNFTKLKN |
| | | FTGLFEFYKLLCVRGIITSKTKSLDKGYNKALNDLCIKVNNWDLFFSPSEDNF |
| | | TNDLNKGEEITSDTNIEAAEENISLDLIQQYYLTFNFDNEPENISIENLSSDIIG |
| | | QLELMPNIERFPNGKKYELDKYTMFHYLRAQEFEHGKSRIALTNSVNEALLN |
| | | PSRVYTFFSSDYVKKVNKATEAAMFLGWVEQLVYDFTDETSEVSTTDKIADI |
| | | TIIIPYIGPALNIGNMLYKDDFVGALIFSGAVILLEFIPEIAIPVLGTFALVSYIAN |
| | | KVLTVQTIDNALSKRNEKWDEVYKYIVTNWLAKVNTQIDLIRKKMKEALEN |
| | | QAEATKAIINYQYNQYTEEEKNNINFNIDDLSSKLNESINKAMININKFLNQC |
| | | SVSYLMNSMIPYGVKRLEDFDASLKDALLKYIYDNRGTLIGQVDRLKDKVN |
| | | NTLSTDIPFQLSKYVDNQRLLSTFTEYIKN |
| 56 | LC-Hn BoNT/A1- | MPFVNKQFNYKDPVNGVDIAYIKIPNAGQMQPVKAFKIHNKIWVIPERDT |
| | K343R | FTNPEEGDLNPPPEAKQVPVSYYDSTYLSTDNEKDNYLKGVTKLFERIYSTDL |
| | | GRMLLTSIVRGIPFWGGSTIDTELKVIDTNCINVIQPDGSYRSEELNLVIIGPS |
| | | ADIIQFECKSFGHEVLNLTRNGYGSTQYIRFSPDFTFGFEESLEVDTNPLLGA |
| | | GKFATDPAVTLAHELIHAGHRLYGIAINPNRVFKVNTNAYYEMSGLEVSFEE |
| | | LRTFGGHDAKFIDSLQENEFRLYYYNKFKDIASTLNKAKSIVGTTASLQYMK |
| | | NVFKEKYLLSEDTSGKFSVDKLKFDKLYRMLTEIYTEDNFVKFFKVLNRKTYL |
| | | NFDKAVFKINIVPKVNYTIYDGFNLRNTNLAANFNGQNTEINNMNFTKLKN |
| | | FTGLFEFYKLLCVRGIITSKTKSLDKGYNKALNDLCIKVNNWDLFFSPSEDNF |
| | | TNDLNKGEEITSDTNIEAAEENISLDLIQQYYLTFNFDNEPENISIENLSSDIIG |
| | | QLELMPNIERFPNGKKYELDKYTMFHYLRAQEFEHGKSRIALTNSVNEALLN |
| | | PSRVYTFFSSDYVKKVNKATEAAMFLGWVEQLVYDFTDETSEVSTTDKIADI |
| | | TIIIPYIGPALNIGNMLYKDDFVGALIFSGAVILLEFIPEIAIPVLGTFALVSYIAN |
| | | KVLTVQTIDNALSKRNEKWDEVYKYIVTNWLAKVNTQIDLIRKKMKEALEN |
| | | QAEATKAIINYQYNQYTEEEKNNINFNIDDLSSKLNESINKAMININKFLNQC |
| | | SVSYLMNSMIPYGVKRLEDFDASLKDALLKYIYDNRGTLIGQVDRLKDKVN |
| | | NTLSTDIPFQLSKYVDNQRLLSTFTEYIKN |
| 57 | LC-Hn BoNT/A1- | MPFVNKQFNYKDPVNGVDIAYIKIPNAGQMQPVKAFKIHNKIWVIPERDT |
| | K356R | FTNPEEGDLNPPPEAKQVPVSYYDSTYLSTDNEKDNYLKGVTKLFERIYSTDL |
| | | GRMLLTSIVRGIPFWGGSTIDTELKVIDTNCINVIQPDGSYRSEELNLVIIGPS |
| | | ADIIQFECKSFGHEVLNLTRNGYGSTQYIRFSPDFTFGFEESLEVDTNPLLGA |
| | | GKFATDPAVTLAHELIHAGHRLYGIAINPNRVFKVNTNAYYEMSGLEVSFEE |
| | | LRTFGGHDAKFIDSLQENEFRLYYYNKFKDIASTLNKAKSIVGTTASLQYMK |
| | | NVFKEKYLLSEDTSGKFSVDKLKFDKLYKMLTEIYTEDNFVRFFKVLNRKTYL |
| | | NFDKAVFKINIVPKVNYTIYDGFNLRNTNLAANFNGQNTEINNMNFTKLKN |
| | | FTGLFEFYKLLCVRGIITSKTKSLDKGYNKALNDLCIKVNNWDLFFSPSEDNF |
| | | TNDLNKGEEITSDTNIEAAEENISLDLIQQYYLTFNFDNEPENISIENLSSDIIG |
| | | QLELMPNIERFPNGKKYELDKYTMFHYLRAQEFEHGKSRIALTNSVNEALLN |
| | | PSRVYTFFSSDYVKKVNKATEAAMFLGWVEQLVYDFTDETSEVSTTDKIADI |
| | | TIIIPYIGPALNIGNMLYKDDFVGALIFSGAVILLEFIPEIAIPVLGTFALVSYIAN |
| | | KVLTVQTIDNALSKRNEKWDEVYKYIVTNWLAKVNTQIDLIRKKMKEALEN |
| | | QAEATKAIINYQYNQYTEEEKNNINFNIDDLSSKLNESINKAMININKFLNQC |
| | | SVSYLMNSMIPYGVKRLEDFDASLKDALLKYIYDNRGTLIGQVDRLKDKVN |
| | | NTLSTDIPFQLSKYVDNQRLLSTFTEYIKN |
| 58 | LC-Hn BoNT/A1- | MPFVNKQFNYKDPVNGVDIAYIKIPNAGQMQPVKAFKIHNKIWVIPERDT |
| | K375R | FTNPEEGDLNPPPEAKQVPVSYYDSTYLSTDNEKDNYLKGVTKLFERIYSTDL |
| | | GRMLLTSIVRGIPFWGGSTIDTELKVIDTNCINVIQPDGSYRSEELNLVIIGPS |
| | | ADIIQFECKSFGHEVLNLTRNGYGSTQYIRFSPDFTFGFEESLEVDTNPLLGA |
| | | GKFATDPAVTLAHELIHAGHRLYGIAINPNRVFKVNTNAYYEMSGLEVSFEE |
| | | LRTFGGHDAKFIDSLQENEFRLYYYNKFKDIASTLNKAKSIVGTTASLQYMK |
| | | NVFKEKYLLSEDTSGKFSVDKLKFDKLYKMLTEIYTEDNFVKFFKVLNRKTYL |
| | | NFDKAVFRINIVPKVNYTIYDGFNLRNTNLAANFNGQNTEINNMNFTKLKN |
| | | FTGLFEFYKLLCVRGIITSKTKSLDKGYNKALNDLCIKVNNWDLFFSPSEDNF |
| | | TNDLNKGEEITSDTNIEAAEENISLDLIQQYYLTFNFDNEPENISIENLSSDIIG |
| | | QLELMPNIERFPNGKKYELDKYTMFHYLRAQEFEHGKSRIALTNSVNEALLN |
| | | PSRVYTFFSSDYVKKVNKATEAAMFLGWVEQLVYDFTDETSEVSTTDKIADI |
| | | TIIIPYIGPALNIGNMLYKDDFVGALIFSGAVILLEFIPEIAIPVLGTFALVSYIAN |
| | | KVLTVQTIDNALSKRNEKWDEVYKYIVTNWLAKVNTQIDLIRKKMKEALEN |
| | | QAEATKAIINYQYNQYTEEEKNNINFNIDDLSSKLNESINKAMININKFLNQC |
| | | SVSYLMNSMIPYGVKRLEDFDASLKDALLKYIYDNRGTLIGQVDRLKDKVN |
| | | NTLSTDIPFQLSKYVDNQRLLSTFTEYIKN |
| 59 | LC-Hn BoNT/A1- | MPFVNKQFNYKDPVNGVDIAYIKIPNAGQMQPVKAFKIHNKIWVIPERDT |
| | K381R | FTNPEEGDLNPPPEAKQVPVSYYDSTYLSTDNEKDNYLKGVTKLFERIYSTDL |
| | | GRMLLTSIVRGIPFWGGSTIDTELKVIDTNCINVIQPDGSYRSEELNLVIIGPS |
| | | ADIIQFECKSFGHEVLNLTRNGYGSTQYIRFSPDFTFGFEESLEVDTNPLLGA |
| | | GKFATDPAVTLAHELIHAGHRLYGIAINPNRVFKVNTNAYYEMSGLEVSFEE |
| | | LRTFGGHDAKFIDSLQENEFRLYYYNKFKDIASTLNKAKSIVGTTASLQYMK |
| | | NVFKEKYLLSEDTSGKFSVDKLKFDKLYKMLTEIYTEDNFVKFFKVLNRKTYL |
| | | NFDKAVFKINIVPRVNYTIYDGFNLRNTNLAANFNGQNTEINNMNFTKLKN |
| | | FTGLFEFYKLLCVRGIITSKTKSLDKGYNKALNDLCIKVNNWDLFFSPSEDNF |
| | | TNDLNKGEEITSDTNIEAAEENISLDLIQQYYLTFNFDNEPENISIENLSSDIIG |
| | | QLELMPNIERFPNGKKYELDKYTMFHYLRAQEFEHGKSRIALTNSVNEALLN |
| | | PSRVYTFFSSDYVKKVNKATEAAMFLGWVEQLVYDFTDETSEVSTTDKIADI |
| | | TIIIPYIGPALNIGNMLYKDDFVGALIFSGAVILLEFIPEIAIPVLGTFALVSYIAN |
| | | KVLTVQTIDNALSKRNEKWDEVYKYIVTNWLAKVNTQIDLIRKKMKEALEN |
| | | QAEATKAIINYQYNQYTEEEKNNINFNIDDLSSKLNESINKAMININKFLNQC |
| | | SVSYLMNSMIPYGVKRLEDFDASLKDALLKYIYDNRGTLIGQVDRLKDKVN |
| | | NTLSTDIPFQLSKYVDNQRLLSTFTEYIKN |
| 60 | LC-Hn BoNT/A1-Y387R | MPFVNKQFNYKDPVNGVDIAYIKIPNAGQMQPVKAFKIHNKIWVIPERDT |
| | | FTNPEEGDLNPPPEAKQVPVSYYDSTYLSTDNEKDNYLKGVTKLFERIYSTDL |
| | | GRMLLTSIVRGIPFWGGSTIDTELKVIDTNCINVIQPDGSYRSEELNLVIIGPS |
| | | ADIIQFECKSFGHEVLNLTRNGYGSTQYIRFSPDFTFGFEESLEVDTNPLLGA |
| | | GKFATDPAVTLAHELIHAGHRLYGIAINPNRVFKVNTNAYYEMSGLEVSFEE |
| | | LRTFGGHDAKFIDSLQENEFRLYYYNKFKDIASTLNKAKSIVGTTASLQYMK |
| | | NVFKEKYLLSEDTSGKFSVDKLKFDKLYKMLTEIYTEDNFVKFFKVLNRKTYL |
| | | NFDKAVFKINIVPKVNYTIRDGFNLRNTNLAANFNGQNTEINNMNFTKLKN |
| | | FTGLFEFYKLLCVRGIITSKTKSLDKGYNKALNDLCIKVNNWDLFFSPSEDNF |
| | | TNDLNKGEEITSDTNIEAAEENISLDLIQQYYLTFNFDNEPENISIENLSSDIIG |
| | | QLELMPNIERFPNGKKYELDKYTMFHYLRAQEFEHGKSRIALTNSVNEALLN |
| | | PSRVYTFFSSDYVKKVNKATEAAMFLGWVEQLVYDFTDETSEVSTTDKIADI |
| | | TIIIPYIGPALNIGNMLYKDDFVGALIFSGAVILLEFIPEIAIPVLGTFALVSYIAN |
| | | KVLTVQTIDNALSKRNEKWDEVYKYIVTNWLAKVNTQIDLIRKKMKEALEN |
| | | QAEATKAIINYQYNQYTEEEKNNINFNIDDLSSKLNESINKAMININKFLNQC |
| | | SVSYLMNSMIPYGVKRLEDFDASLKDALLKYIYDNRGTLIGQVDRLKDKVN |
| | | NTLSTDIPFQLSKYVDNQRLLSTFTEYIKN |
| 61 | LC-Hn BoNT/A1- | MPFVNKQFNYKDPVNGVDIAYIKIPNAGQMQPVKAFKIHNKIWVIPERDT |
| | M411R | FTNPEEGDLNPPPEAKQVPVSYYDSTYLSTDNEKDNYLKGVTKLFERIYSTDL |
| | | GRMLLTSIVRGIPFWGGSTIDTELKVIDTNCINVIQPDGSYRSEELNLVIIGPS |
| | | ADIIQFECKSFGHEVLNLTRNGYGSTQYIRFSPDFTFGFEESLEVDTNPLLGA |
| | | GKFATDPAVTLAHELIHAGHRLYGIAINPNRVFKVNTNAYYEMSGLEVSFEE |
| | | LRTFGGHDAKFIDSLQENEFRLYYYNKFKDIASTLNKAKSIVGTTASLQYMK |
| | | NVFKEKYLLSEDTSGKFSVDKLKFDKLYKMLTEIYTEDNFVKFFKVLNRKTYL |
| | | NFDKAVFKINIVPKVNYTIYDGFNLRNTNLAANFNGQNTEINNRNFTKLKN |
| | | FTGLFEFYKLLCVRGIITSKTKSLDKGYNKALNDLCIKVNNWDLFFSPSEDNF |
| | | TNDLNKGEEITSDTNIEAAEENISLDLIQQYYLTFNFDNEPENISIENLSSDIIG |
| | | QLELMPNIERFPNGKKYELDKYTMFHYLRAQEFEHGKSRIALTNSVNEALLN |
| | | PSRVYTFFSSDYVKKVNKATEAAMFLGWVEQLVYDFTDETSEVSTTDKIADI |
| | | TIIIPYIGPALNIGNMLYKDDFVGALIFSGAVILLEFIPEIAIPVLGTFALVSYIAN |
| | | KVLTVQTIDNALSKRNEKWDEVYKYIVTNWLAKVNTQIDLIRKKMKEALEN |
| | | QAEATKAIINYQYNQYTEEEKNNINFNIDDLSSKLNESINKAMININKFLNQC |
| | | SVSYLMNSMIPYGVKRLEDFDASLKDALLKYIYDNRGTLIGQVDRLKDKVN |
| | | NTLSTDIPFQLSKYVDNQRLLSTFTEYIKN |
| 62 | LC-Hn BoNT/A1- | MPFVNKQFNYKDPVNGVDIAYIKIPNAGQMQPVKAFKIHNKIWVIPERDT |
| | K415R | FTNPEEGDLNPPPEAKQVPVSYYDSTYLSTDNEKDNYLKGVTKLFERIYSTDL |
| | | GRMLLTSIVRGIPFWGGSTIDTELKVIDTNCINVIQPDGSYRSEELNLVIIGPS |
| | | ADIIQFECKSFGHEVLNLTRNGYGSTQYIRFSPDFTFGFEESLEVDTNPLLGA |
| | | GKFATDPAVTLAHELIHAGHRLYGIAINPNRVFKVNTNAYYEMSGLEVSFEE |
| | | LRTFGGHDAKFIDSLQENEFRLYYYNKFKDIASTLNKAKSIVGTTASLQYMK |
| | | NVFKEKYLLSEDTSGKFSVDKLKFDKLYKMLTEIYTEDNFVKFFKVLNRKTYL |
| | | NFDKAVFKINIVPKVNYTIYDGFNLRNTNLAANFNGQNTEINNMNFTRLKN |
| | | FTGLFEFYKLLCVRGIITSKTKSLDKGYNKALNDLCIKVNNWDLFFSPSEDNF |
| | | TNDLNKGEEITSDTNIEAAEENISLDLIQQYYLTFNFDNEPENISIENLSSDIIG |
| | | QLELMPNIERFPNGKKYELDKYTMFHYLRAQEFEHGKSRIALTNSVNEALLN |
| | | PSRVYTFFSSDYVKKVNKATEAAMFLGWVEQLVYDFTDETSEVSTTDKIADI |
| | | TIIIPYIGPALNIGNMLYKDDFVGALIFSGAVILLEFIPEIAIPVLGTFALVSYIAN |
| | | KVLTVQTIDNALSKRNEKWDEVYKYIVTNWLAKVNTQIDLIRKKMKEALEN |
| | | QAEATKAIINYQYNQYTEEEKNNINFNIDDLSSKLNESINKAMININKFLNQC |
| | | SVSYLMNSMIPYGVKRLEDFDASLKDALLKYIYDNRGTLIGQVDRLKDKVN |
| | | NTLSTDIPFQLSKYVDNQRLLSTFTEYIKN |
| 63 | LC-Hn BoNT/A1-Group | MPFVNKQFNYRDPVNGVDIAYIKIPNAGQMQPVKAFKIHNKIWVIPERDT |
| | 0 (K11R, K335R, | FTNPEEGDLNPPPEAKQVPVSYYDSTYLSTDNEKDNYLKGVTKLFERIYSTDL |
| | K337R, K343R, K375R, | GRMLLTSIVRGIPFWGGSTIDTELKVIDTNCINVIQPDGSYRSEELNLVIIGPS |
| | K415R) | ADIIQFECKSFGHEVLNLTRNGYGSTQYIRFSPDFTFGFEESLEVDTNPLLGA |
| | | GKFATDPAVTLAHELIHAGHRLYGIAINPNRVFKVNTNAYYEMSGLEVSFEE |
| | | LRTFGGHDAKFIDSLQENEFRLYYYNKFKDIASTLNKAKSIVGTTASLQYMK |
| | | NVFKEKYLLSEDTSGKFSVDRLRFDKLYRMLTEIYTEDNFVKFFKVLNRKTYL |
| | | NFDKAVFRINIVPKVNYTIYDGFNLRNTNLAANFNGQNTEINNMNFTRLKN |
| | | FTGLFEFYKLLCVRGIITSKTKSLDKGYNKALNDLCIKVNNWDLFFSPSEDNF |
| | | TNDLNKGEEITSDTNIEAAEENISLDLIQQYYLTFNFDNEPENISIENLSSDIIG |
| | | QLELMPNIERFPNGKKYELDKYTMFHYLRAQEFEHGKSRIALTNSVNEALLN |
| | | PSRVYTFFSSDYVKKVNKATEAAMFLGWVEQLVYDFTDETSEVSTTDKIADI |
| | | TIIIPYIGPALNIGNMLYKDDFVGALIFSGAVILLEFIPEIAIPVLGTFALVSYIAN |
| | | KVLTVQTIDNALSKRNEKWDEVYKYIVTNWLAKVNTQIDLIRKKMKEALEN |
| | | QAEATKAIINYQYNQYTEEEKNNINFNIDDLSSKLNESINKAMININKFLNQC |
| | | SVSYLMNSMIPYGVKRLEDFDASLKDALLKYIYDNRGTLIGQVDRLKDKVN |
| | | NTLSTDIPFQLSKYVDNQRLLSTFTEYIKN |
| 64 | LC-Hn BoNT/A1-Group | MPFVNKQFNYKDPVNGVDIAYIKIPNAGQMQPVKAFKIHNRIWVIPERDT |
| | 1 (K41R, K318R, | FTNPEEGDLNPPPEAKQVPVSYYDSTYLSTDNEKDNYLKGVTKLFERIYSTDL |
| | K340R) | GRMLLTSIVRGIPFWGGSTIDTELKVIDTNCINVIQPDGSYRSEELNLVIIGPS |
| | | ADIIQFECKSFGHEVLNLTRNGYGSTQYIRFSPDFTFGFEESLEVDTNPLLGA |
| | | GKFATDPAVTLAHELIHAGHRLYGIAINPNRVFKVNTNAYYEMSGLEVSFEE |
| | | LRTFGGHDAKFIDSLQENEFRLYYYNKFKDIASTLNKAKSIVGTTASLQYMK |
| | | NVFREKYLLSEDTSGKFSVDKLKFDRLYKMLTEIYTEDNFVKFFKVLNRKTYL |
| | | NFDKAVFKINIVPKVNYTIYDGFNLRNTNLAANFNGQNTEINNMNFTKLKN |
| | | FTGLFEFYKLLCVRGIITSKTKSLDKGYNKALNDLCIKVNNWDLFFSPSEDNF |
| | | TNDLNKGEEITSDTNIEAAEENISLDLIQQYYLTFNFDNEPENISIENLSSDIIG |
| | | QLELMPNIERFPNGKKYELDKYTMFHYLRAQEFEHGKSRIALTNSVNEALLN |
| | | PSRVYTFFSSDYVKKVNKATEAAMFLGWVEQLVYDFTDETSEVSTTDKIADI |
| | | TIIIPYIGPALNIGNMLYKDDFVGALIFSGAVILLEFIPEIAIPVLGTFALVSYIAN |
| | | KVLTVQTIDNALSKRNEKWDEVYKYIVTNWLAKVNTQIDLIRKKMKEALEN |
| | | QAEATKAIINYQYNQYTEEEKNNINFNIDDLSSKLNESINKAMININKFLNQC |
| | | SVSYLMNSMIPYGVKRLEDFDASLKDALLKYIYDNRGTLIGQVDRLKDKVN |
| | | NTLSTDIPFQLSKYVDNQRLLSTFTEYIKN |
| 65 | LC-Hn BoNT/A1-Group | MPFVNKQFNYKDPVNGVDIAYIKIPNAGQMQPVKAFKIHNKIWVIPERDT |
| | 2 (K289R, K291R, | FTNPEEGDLNPPPEAKQVPVSYYDSTYLSTDNEKDNYLKGVTKLFERIYSTDL |
| | K299R, K381R) | GRMLLTSIVRGIPFWGGSTIDTELKVIDTNCINVIQPDGSYRSEELNLVIIGPS |
| | | ADIIQFECKSFGHEVLNLTRNGYGSTQYIRFSPDFTFGFEESLEVDTNPLLGA |
| | | GKFATDPAVTLAHELIHAGHRLYGIAINPNRVFKVNTNAYYEMSGLEVSFEE |
| | | LRTFGGHDAKFIDSLQENEFRLYYYNRFRDIASTLNRAKSIVGTTASLQYMK |
| | | NVFKEKYLLSEDTSGKFSVDKLKFDKLYKMLTEIYTEDNFVKFFKVLNRKTYL |
| | | NFDKAVFKINIVPRVNYTIYDGFNLRNTNLAANFNGQNTEINNMNFTKLKN |
| | | FTGLFEFYKLLCVRGIITSKTKSLDKGYNKALNDLCIKVNNWDLFFSPSEDNF |
| | | TNDLNKGEEITSDTNIEAAEENISLDLIQQYYLTFNFDNEPENISIENLSSDIIG |
| | | QLELMPNIERFPNGKKYELDKYTMFHYLRAQEFEHGKSRIALTNSVNEALLN |
| | | PSRVYTFFSSDYVKKVNKATEAAMFLGWVEQLVYDFTDETSEVSTTDKIADI |
| | | TIIIPYIGPALNIGNMLYKDDFVGALIFSGAVILLEFIPEIAIPVLGTFALVSYIAN |
| | | KVLTVQTIDNALSKRNEKWDEVYKYIVTNWLAKVNTQIDLIRKKMKEALEN |
| | | QAEATKAIINYQYNQYTEEEKNNINFNIDDLSSKLNESINKAMININKFLNQC |
| | | SVSYLMNSMIPYGVKRLEDFDASLKDALLKYIYDNRGTLIGQVDRLKDKVN |
| | | NTLSTDIPFQLSKYVDNQRLLSTFTEYIKN |
| 66 | LC-Hn BoNT/A1-Group | MPFVNKQFNYKDPVNGVDIAYIKIPNAGQMQPVKAFKIHNKIWVIPERDT |
| | 3 (K212R, K272R, | FTNPEEGDLNPPPEAKQVPVSYYDSTYLSTDNEKDNYLKGVTKLFERIYSTDL |
| | K356R) | GRMLLTSIVRGIPFWGGSTIDTELKVIDTNCINVIQPDGSYRSEELNLVIIGPS |
| | | ADIIQFECKSFGHEVLNLTRNGYGSTQYIRFSPDFTFGFEESLEVDTNPLLGA |
| | | GRFATDPAVTLAHELIHAGHRLYGIAINPNRVFKVNTNAYYEMSGLEVSFEE |
| | | LRTFGGHDARFIDSLQENEFRLYYYNKFKDIASTLNKAKSIVGTTASLQYMK |
| | | NVFKEKYLLSEDTSGKFSVDKLKFDKLYKMLTEIYTEDNFVRFFKVLNRKTYL |
| | | NFDKAVFKINIVPKVNYTIYDGFNLRNTNLAANFNGQNTEINNMNFTKLKN |
| | | FTGLFEFYKLLCVRGIITSKTKSLDKGYNKALNDLCIKVNNWDLFFSPSEDNF |
| | | TNDLNKGEEITSDTNIEAAEENISLDLIQQYYLTFNFDNEPENISIENLSSDIIG |
| | | QLELMPNIERFPNGKKYELDKYTMFHYLRAQEFEHGKSRIALTNSVNEALLN |
| | | PSRVYTFFSSDYVKKVNKATEAAMFLGWVEQLVYDFTDETSEVSTTDKIADI |
| | | TIIIPYIGPALNIGNMLYKDDFVGALIFSGAVILLEFIPEIAIPVLGTFALVSYIAN |
| | | KVLTVQTIDNALSKRNEKWDEVYKYIVTNWLAKVNTQIDLIRKKMKEALEN |
| | | QAEATKAIINYQYNQYTEEEKNNINFNIDDLSSKLNESINKAMININKFLNQC |
| | | SVSYLMNSMIPYGVKRLEDFDASLKDALLKYIYDNRGTLIGQVDRLKDKVN |
| | | NTLSTDIPFQLSKYVDNQRLLSTFTEYIKN |
| 67 | LC-Hn BoNT/A1-KR9 | MPFVNKQFNYRDPVNGVDIAYIKIPNAGQMQPVKAFKIHNRIWVIPERDT |
| | (K11R, K41R, K318R, | FTNPEEGDLNPPPEAKQVPVSYYDSTYLSTDNEKDNYLKGVTKLFERIYSTDL |
| | K335R, K337R, K340R, | GRMLLTSIVRGIPFWGGSTIDTELKVIDTNCINVIQPDGSYRSEELNLVIIGPS |
| | K343R, K375R, K415R) | ADIIQFECKSFGHEVLNLTRNGYGSTQYIRFSPDFTFGFEESLEVDTNPLLGA |
| | | GKFATDPAVTLAHELIHAGHRLYGIAINPNRVFKVNTNAYYEMSGLEVSFEE |
| | | LRTFGGHDAKFIDSLQENEFRLYYYNKFKDIASTLNKAKSIVGTTASLQYMK |
| | | NVFREKYLLSEDTSGKFSVDRLRFDRLYRMLTEIYTEDNFVKFFKVLNRKTYL |
| | | NFDKAVFRINIVPKVNYTIYDGFNLRNTNLAANFNGQNTEINNMNFTRLKN |
| | | FTGLFEFYKLLCVRGIITSKTKSLDKGYNKALNDLCIKVNNWDLFFSPSEDNF |
| | | TNDLNKGEEITSDTNIEAAEENISLDLIQQYYLTFNFDNEPENISIENLSSDIIG |
| | | QLELMPNIERFPNGKKYELDKYTMFHYLRAQEFEHGKSRIALTNSVNEALLN |
| | | PSRVYTFFSSDYVKKVNKATEAAMFLGWVEQLVYDFTDETSEVSTTDKIADI |
| | | TIIIPYIGPALNIGNMLYKDDFVGALIFSGAVILLEFIPEIAIPVLGTFALVSYIAN |
| | | KVLTVQTIDNALSKRNEKWDEVYKYIVTNWLAKVNTQIDLIRKKMKEALEN |
| | | QAEATKAIINYQYNQYTEEEKNNINFNIDDLSSKLNESINKAMININKFLNQC |
| | | SVSYLMNSMIPYGVKRLEDFDASLKDALLKYIYDNRGTLIGQVDRLKDKVN |
| | | NTLSTDIPFQLSKYVDNQRLLSTFTEYIKN |
| 68 | LC-Hn BoNT/A1-KR10 | MPFVNKQFNYRDPVNGVDIAYIKIPNAGQMQPVKAFKIHNKIWVIPERDT |
| | (K11R, K289R, K291R, | FTNPEEGDLNPPPEAKQVPVSYYDSTYLSTDNEKDNYLKGVTKLFERIYSTDL |
| | K299R, K335R, K337R, | GRMLLTSIVRGIPFWGGSTIDTELKVIDTNCINVIQPDGSYRSEELNLVIIGPS |
| | K343R, K375R, K381R, | ADIIQFECKSFGHEVLNLTRNGYGSTQYIRFSPDFTFGFEESLEVDTNPLLGA |
| | K415R) | GKFATDPAVTLAHELIHAGHRLYGIAINPNRVFKVNTNAYYEMSGLEVSFEE |
| | | LRTFGGHDAKFIDSLQENEFRLYYYNRFRDIASTLNRAKSIVGTTASLQYMK |
| | | NVFKEKYLLSEDTSGKFSVDRLRFDKLYRMLTEIYTEDNFVKFFKVLNRKTYL |
| | | NFDKAVFRINIVPRVNYTIYDGFNLRNTNLAANFNGQNTEINNMNFTRLK |
| | | NFTGLFEFYKLLCVRGIITSKTKSLDKGYNKALNDLCIKVNNWDLFFSPSEDN |
| | | FTNDLNKGEEITSDTNIEAAEENISLDLIQQYYLTFNFDNEPENISIENLSSDII |
| | | GQLELMPNIERFPNGKKYELDKYTMFHYLRAQEFEHGKSRIALTNSVNEALL |
| | | NPSRVYTFFSSDYVKKVNKATEAAMFLGWVEQLVYDFTDETSEVSTTDKIA |
| | | DITIIIPYIGPALNIGNMLYKDDFVGALIFSGAVILLEFIPEIAIPVLGTFALVSYI |
| | | ANKVLTVQTIDNALSKRNEKWDEVYKYIVTNWLAKVNTQIDLIRKKMKEAL |
| | | ENQAEATKAIINYQYNQYTEEEKNNINFNIDDLSSKLNESINKAMININKFLN |
| | | QCSVSYLMNSMIPYGVKRLEDFDASLKDALLKYIYDNRGTLIGQVDRLKDKV |
| | | NNTLSTDIPFQLSKYVDNQRLLSTFTEYIKN |
| 69 | LC-Hn BoNT/A1-KR11- | MPFVNKQFNYRDPVNGVDIAYIKIPNAGQMQPVKAFKIHNRIWVIPERDT |
| | 41 (K11R, K41R, | FTNPEEGDLNPPPEAKQVPVSYYDSTYLSTDNEKDNYLKGVTKLFERIYSTDL |
| | K289R, K291R, K299R, | GRMLLTSIVRGIPFWGGSTIDTELKVIDTNCINVIQPDGSYRSEELNLVIIGPS |
| | K335R, K337R, K343R, | ADIIQFECKSFGHEVLNLTRNGYGSTQYIRFSPDFTFGFEESLEVDTNPLLGA |
| | K375R, K381R, K415R) | GKFATDPAVTLAHELIHAGHRLYGIAINPNRVFKVNTNAYYEMSGLEVSFEE |
| | | LRTFGGHDAKFIDSLQENEFRLYYYNRFRDIASTLNRAKSIVGTTASLQYMK |
| | | NVFKEKYLLSEDTSGKFSVDRLRFDKLYRMLTEIYTEDNFVKFFKVLNRKTYL |
| | | NFDKAVFRINIVPRVNYTIYDGFNLRNTNLAANFNGQNTEINNMNFTRLK |
| | | NFTGLFEFYKLLCVRGIITSKTKSLDKGYNKALNDLCIKVNNWDLFFSPSEDN |
| | | FTNDLNKGEEITSDTNIEAAEENISLDLIQQYYLTFNFDNEPENISIENLSSDII |
| | | GQLELMPNIERFPNGKKYELDKYTMFHYLRAQEFEHGKSRIALTNSVNEALL |
| | | NPSRVYTFFSSDYVKKVNKATEAAMFLGWVEQLVYDFTDETSEVSTTDKIA |
| | | DITIIIPYIGPALNIGNMLYKDDFVGALIFSGAVILLEFIPEIAIPVLGTFALVSYI |
| | | ANKVLTVQTIDNALSKRNEKWDEVYKYIVTNWLAKVNTQIDLIRKKMKEAL |
| | | ENQAEATKAIINYQYNQYTEEEKNNINFNIDDLSSKLNESINKAMININKFLN |
| | | QCSVSYLMNSMIPYGVKRLEDFDASLKDALLKYIYDNRGTLIGQVDRLKDKV |
| | | NNTLSTDIPFQLSKYVDNQRLLSTFTEYIKN |
| 70 | LC-Hn BoNT/A1-KR11- | MPFVNKQFNYRDPVNGVDIAYIKIPNAGQMQPVKAFKIHNKIWVIPERDT |
| | 212 (K11R, K212R, | FTNPEEGDLNPPPEAKQVPVSYYDSTYLSTDNEKDNYLKGVTKLFERIYSTDL |
| | K289R, K291R, K299R, | GRMLLTSIVRGIPFWGGSTIDTELKVIDTNCINVIQPDGSYRSEELNLVIIGPS |
| | K335R, K337R, K343R, | ADIIQFECKSFGHEVLNLTRNGYGSTQYIRFSPDFTFGFEESLEVDTNPLLGA |
| | K375R, K381R, K415R) | GRFATDPAVTLAHELIHAGHRLYGIAINPNRVFKVNTNAYYEMSGLEVSFEE |
| | | LRTFGGHDAKFIDSLQENEFRLYYYNRFRDIASTLNRAKSIVGTTASLQYMK |
| | | NVFKEKYLLSEDTSGKFSVDRLRFDKLYRMLTEIYTEDNFVKFFKVLNRKTYL |
| | | NFDKAVFRINIVPRVNYTIYDGFNLRNTNLAANFNGQNTEINNMNFTRLK |
| | | NFTGLFEFYKLLCVRGIITSKTKSLDKGYNKALNDLCIKVNNWDLFFSPSEDN |
| | | FTNDLNKGEEITSDTNIEAAEENISLDLIQQYYLTFNFDNEPENISIENLSSDII |
| | | GQLELMPNIERFPNGKKYELDKYTMFHYLRAQEFEHGKSRIALTNSVNEALL |
| | | NPSRVYTFFSSDYVKKVNKATEAAMFLGWVEQLVYDFTDETSEVSTTDKIA |
| | | DITIIIPYIGPALNIGNMLYKDDFVGALIFSGAVILLEFIPEIAIPVLGTFALVSYI |
| | | ANKVLTVQTIDNALSKRNEKWDEVYKYIVTNWLAKVNTQIDLIRKKMKEAL |
| | | ENQAEATKAIINYQYNQYTEEEKNNINFNIDDLSSKLNESINKAMININKFLN |
| | | QCSVSYLMNSMIPYGVKRLEDFDASLKDALLKYIYDNRGTLIGQVDRLKDKV |
| | | NNTLSTDIPFQLSKYVDNQRLLSTFTEYIKN |
| 71 | LC-Hn BoNT/A1-KR11- | MPFVNKQFNYRDPVNGVDIAYIKIPNAGQMQPVKAFKIHNKIWVIPERDT |
| | 272 (K11R, K272R, | FTNPEEGDLNPPPEAKQVPVSYYDSTYLSTDNEKDNYLKGVTKLFERIYSTDL |
| | K289R, K291R, K299R, | GRMLLTSIVRGIPFWGGSTIDTELKVIDTNCINVIQPDGSYRSEELNLVIIGPS |
| | K335R, K337R, K343R, | ADIIQFECKSFGHEVLNLTRNGYGSTQYIRFSPDFTFGFEESLEVDTNPLLGA |
| | K375R, K381R, K415R) | GKFATDPAVTLAHELIHAGHRLYGIAINPNRVFKVNTNAYYEMSGLEVSFEE |
| | | LRTFGGHDARFIDSLQENEFRLYYYNRFRDIASTLNRAKSIVGTTASLQYMK |
| | | NVFKEKYLLSEDTSGKFSVDRLRFDKLYRMLTEIYTEDNFVKFFKVLNRKTYL |
| | | NFDKAVFRINIVPRVNYTIYDGFNLRNTNLAANFNGQNTEINNMNFTRLK |
| | | NFTGLFEFYKLLCVRGIITSKTKSLDKGYNKALNDLCIKVNNWDLFFSPSEDN |
| | | FTNDLNKGEEITSDTNIEAAEENISLDLIQQYYLTFNFDNEPENISIENLSSDII |
| | | GQLELMPNIERFPNGKKYELDKYTMFHYLRAQEFEHGKSRIALTNSVNEALL |
| | | NPSRVYTFFSSDYVKKVNKATEAAMFLGWVEQLVYDFTDETSEVSTTDKIA |
| | | DITIIIPYIGPALNIGNMLYKDDFVGALIFSGAVILLEFIPEIAIPVLGTFALVSYI |
| | | ANKVLTVQTIDNALSKRNEKWDEVYKYIVTNWLAKVNTQIDLIRKKMKEAL |
| | | ENQAEATKAIINYQYNQYTEEEKNNINFNIDDLSSKLNESINKAMININKFLN |
| | | QCSVSYLMNSMIPYGVKRLEDFDASLKDALLKYIYDNRGTLIGQVDRLKDKV |
| | | NNTLSTDIPFQLSKYVDNQRLLSTFTEYIKN |
| 72 | LC-Hn BoNT/A1-KR11- | MPFVNKQFNYRDPVNGVDIAYIKIPNAGQMQPVKAFKIHNKIWVIPERDT |
| | 318 (K11R, K289R, | FTNPEEGDLNPPPEAKQVPVSYYDSTYLSTDNEKDNYLKGVTKLFERIYSTDL |
| | K291R, K299R, K318R, | GRMLLTSIVRGIPFWGGSTIDTELKVIDTNCINVIQPDGSYRSEELNLVIIGPS |
| | K335R, K337R, K343R, | ADIIQFECKSFGHEVLNLTRNGYGSTQYIRFSPDFTFGFEESLEVDTNPLLGA |
| | K375R, K381R, K415R) | GKFATDPAVTLAHELIHAGHRLYGIAINPNRVFKVNTNAYYEMSGLEVSFEE |
| | | LRTFGGHDAKFIDSLQENEFRLYYYNRFRDIASTLNRAKSIVGTTASLQYMK |
| | | NVFREKYLLSEDTSGKFSVDRLRFDKLYRMLTEIYTEDNFVKFFKVLNRKTYL |
| | | NFDKAVFRINIVPRVNYTIYDGFNLRNTNLAANFNGQNTEINNMNFTRLK |
| | | NFTGLFEFYKLLCVRGIITSKTKSLDKGYNKALNDLCIKVNNWDLFFSPSEDN |
| | | FTNDLNKGEEITSDTNIEAAEENISLDLIQQYYLTFNFDNEPENISIENLSSDII |
| | | GQLELMPNIERFPNGKKYELDKYTMFHYLRAQEFEHGKSRIALTNSVNEALL |
| | | NPSRVYTFFSSDYVKKVNKATEAAMFLGWVEQLVYDFTDETSEVSTTDKIA |
| | | DITIIIPYIGPALNIGNMLYKDDFVGALIFSGAVILLEFIPEIAIPVLGTFALVSYI |
| | | ANKVLTVQTIDNALSKRNEKWDEVYKYIVTNWLAKVNTQIDLIRKKMKEAL |
| | | ENQAEATKAIINYQYNQYTEEEKNNINFNIDDLSSKLNESINKAMININKFLN |
| | | QCSVSYLMNSMIPYGVKRLEDFDASLKDALLKYIYDNRGTLIGQVDRLKDKV |
| | | NNTLSTDIPFQLSKYVDNQRLLSTFTEYIKN |
| 73 | LC-Hn BoNT/A1-KR11- | MPFVNKQFNYRDPVNGVDIAYIKIPNAGQMQPVKAFKIHNKIWVIPERDT |
| | 340 (K11R, K289R, | FTNPEEGDLNPPPEAKQVPVSYYDSTYLSTDNEKDNYLKGVTKLFERIYSTDL |
| | K291R, K299R, K335R, | GRMLLTSIVRGIPFWGGSTIDTELKVIDTNCINVIQPDGSYRSEELNLVIIGPS |
| | K337R, K340R, K343R, | ADIIQFECKSFGHEVLNLTRNGYGSTQYIRFSPDFTFGFEESLEVDTNPLLGA |
| | K375R, K381R, K415R) | GKFATDPAVTLAHELIHAGHRLYGIAINPNRVFKVNTNAYYEMSGLEVSFEE |
| | | LRTFGGHDAKFIDSLQENEFRLYYYNRFRDIASTLNRAKSIVGTTASLQYMK |
| | | NVFKEKYLLSEDTSGKFSVDRLRFDRLYRMLTEIYTEDNFVKFFKVLNRKTYL |
| | | NFDKAVFRINIVPRVNYTIYDGFNLRNTNLAANFNGQNTEINNMNFTRLK |
| | | NFTGLFEFYKLLCVRGIITSKTKSLDKGYNKALNDLCIKVNNWDLFFSPSEDN |
| | | FTNDLNKGEEITSDTNIEAAEENISLDLIQQYYLTFNFDNEPENISIENLSSDII |
| | | GQLELMPNIERFPNGKKYELDKYTMFHYLRAQEFEHGKSRIALTNSVNEALL |
| | | NPSRVYTFFSSDYVKKVNKATEAAMFLGWVEQLVYDFTDETSEVSTTDKIA |
| | | DITIIIPYIGPALNIGNMLYKDDFVGALIFSGAVILLEFIPEIAIPVLGTFALVSYI |
| | | ANKVLTVQTIDNALSKRNEKWDEVYKYIVTNWLAKVNTQIDLIRKKMKEAL |
| | | ENQAEATKAIINYQYNQYTEEEKNNINFNIDDLSSKLNESINKAMININKFLN |
| | | QCSVSYLMNSMIPYGVKRLEDFDASLKDALLKYIYDNRGTLIGQVDRLKDKV |
| | | NNTLSTDIPFQLSKYVDNQRLLSTFTEYIKN |
| 74 | LC-Hn BoNT/A1-KR11- | MPFVNKQFNYRDPVNGVDIAYIKIPNAGQMQPVKAFKIHNKIWVIPERDT |
| | 356 (K11R, K289R, | FTNPEEGDLNPPPEAKQVPVSYYDSTYLSTDNEKDNYLKGVTKLFERIYSTDL |
| | K291R, K299R, K335R, | GRMLLTSIVRGIPFWGGSTIDTELKVIDTNCINVIQPDGSYRSEELNLVIIGPS |
| | K337R, K343R, K356R, | ADIIQFECKSFGHEVLNLTRNGYGSTQYIRFSPDFTFGFEESLEVDTNPLLGA |
| | K375R, K381R, K415R) | GKFATDPAVTLAHELIHAGHRLYGIAINPNRVFKVNTNAYYEMSGLEVSFEE |
| | | LRTFGGHDAKFIDSLQENEFRLYYYNRFRDIASTLNRAKSIVGTTASLQYMK |
| | | NVFKEKYLLSEDTSGKFSVDRLRFDKLYRMLTEIYTEDNFVRFFKVLNRKTYL |
| | | NFDKAVFRINIVPRVNYTIYDGFNLRNTNLAANFNGQNTEINNMNFTRLK |
| | | NFTGLFEFYKLLCVRGIITSKTKSLDKGYNKALNDLCIKVNNWDLFFSPSEDN |
| | | FTNDLNKGEEITSDTNIEAAEENISLDLIQQYYLTFNFDNEPENISIENLSSDII |
| | | GQLELMPNIERFPNGKKYELDKYTMFHYLRAQEFEHGKSRIALTNSVNEALL |
| | | NPSRVYTFFSSDYVKKVNKATEAAMFLGWVEQLVYDFTDETSEVSTTDKIA |
| | | DITIIIPYIGPALNIGNMLYKDDFVGALIFSGAVILLEFIPEIAIPVLGTFALVSYI |
| | | ANKVLTVQTIDNALSKRNEKWDEVYKYIVTNWLAKVNTQIDLIRKKMKEAL |
| | | ENQAEATKAIINYQYNQYTEEEKNNINFNIDDLSSKLNESINKAMININKFLN |
| | | QCSVSYLMNSMIPYGVKRLEDFDASLKDALLKYIYDNRGTLIGQVDRLKDKV |
| | | NNTLSTDIPFQLSKYVDNQRLLSTFTEYIKN |
| 75 | LC-Hn BoNT/A1-KR13 | MPFVNKQFNYRDPVNGVDIAYIKIPNAGQMQPVKAFKIHNRIWVIPERDT |
| | (K11R, K41R, K289R, | FTNPEEGDLNPPPEAKQVPVSYYDSTYLSTDNEKDNYLKGVTKLFERIYSTDL |
| | K291R, K299R, K318R, | GRMLLTSIVRGIPFWGGSTIDTELKVIDTNCINVIQPDGSYRSEELNLVIIGPS |
| | K335R, K337R, K340R, | ADIIQFECKSFGHEVLNLTRNGYGSTQYIRFSPDFTFGFEESLEVDTNPLLGA |
| | K343R, K375R, K381R, | GKFATDPAVTLAHELIHAGHRLYGIAINPNRVFKVNTNAYYEMSGLEVSFEE |
| | K415R) | LRTFGGHDAKFIDSLQENEFRLYYYNRFRDIASTLNRAKSIVGTTASLQYMK |
| | | NVFREKYLLSEDTSGKFSVDRLRFDRLYRMLTEIYTEDNFVKFFKVLNRKTYL |
| | | NFDKAVFRINIVPRVNYTIYDGFNLRNTNLAANFNGQNTEINNMNFTRLK |
| | | NFTGLFEFYKLLCVRGIITSKTKSLDKGYNKALNDLCIKVNNWDLFFSPSEDN |
| | | FTNDLNKGEEITSDTNIEAAEENISLDLIQQYYLTFNFDNEPENISIENLSSDII |
| | | GQLELMPNIERFPNGKKYELDKYTMFHYLRAQEFEHGKSRIALTNSVNEALL |
| | | NPSRVYTFFSSDYVKKVNKATEAAMFLGWVEQLVYDFTDETSEVSTTDKIA |
| | | DITIIIPYIGPALNIGNMLYKDDFVGALIFSGAVILLEFIPEIAIPVLGTFALVSYI |
| | | ANKVLTVQTIDNALSKRNEKWDEVYKYIVTNWLAKVNTQIDLIRKKMKEAL |
| | | ENQAEATKAIINYQYNQYTEEEKNNINFNIDDLSSKLNESINKAMININKFLN |
| | | QCSVSYLMNSMIPYGVKRLEDFDASLKDALLKYIYDNRGTLIGQVDRLKDKV |
| | | NNTLSTDIPFQLSKYVDNQRLLSTFTEYIKN |
| 76 | LC-Hn BoNT/A1-KR15 | MPFVNKQFNYRDPVNGVDIAYIKIPNAGQMQPVKAFKIHNRIWVIPERDT |
| | (K11R, K41R, K212R, | FTNPEEGDLNPPPEAKQVPVSYYDSTYLSTDNEKDNYLKGVTKLFERIYSTDL |
| | K289R, K291R, K299R, | GRMLLTSIVRGIPFWGGSTIDTELKVIDTNCINVIQPDGSYRSEELNLVIIGPS |
| | K318R, K335R, K337R, | ADIIQFECKSFGHEVLNLTRNGYGSTQYIRFSPDFTFGFEESLEVDTNPLLGA |
| | K340R, K343R, K356R, | GRFATDPAVTLAHELIHAGHRLYGIAINPNRVFKVNTNAYYEMSGLEVSFEE |
| | K375R, K381R, K415R) | LRTFGGHDAKFIDSLQENEFRLYYYNRFRDIASTLNRAKSIVGTTASLQYMK |
| | | NVFREKYLLSEDTSGKFSVDRLRFDRLYRMLTEIYTEDNFVRFFKVLNRKTYL |
| | | NFDKAVFRINIVPRVNYTIYDGFNLRNTNLAANFNGQNTEINNMNFTRLK |
| | | NFTGLFEFYKLLCVRGIITSKTKSLDKGYNKALNDLCIKVNNWDLFFSPSEDN |
| | | FTNDLNKGEEITSDTNIEAAEENISLDLIQQYYLTFNFDNEPENISIENLSSDII |
| | | GQLELMPNIERFPNGKKYELDKYTMFHYLRAQEFEHGKSRIALTNSVNEALL |
| | | NPSRVYTFFSSDYVKKVNKATEAAMFLGWVEQLVYDFTDETSEVSTTDKIA |
| | | DITIIIPYIGPALNIGNMLYKDDFVGALIFSGAVILLEFIPEIAIPVLGTFALVSYI |
| | | ANKVLTVQTIDNALSKRNEKWDEVYKYIVTNWLAKVNTQIDLIRKKMKEAL |
| | | ENQAEATKAIINYQYNQYTEEEKNNINFNIDDLSSKLNESINKAMININKFLN |
| | | QCSVSYLMNSMIPYGVKRLEDFDASLKDALLKYIYDNRGTLIGQVDRLKDKV |
| | | NNTLSTDIPFQLSKYVDNQRLLSTFTEYIKN |
| 77 | LC-Hn BoNT/A1-KR16 | MPFVNKQFNYRDPVNGVDIAYIKIPNAGQMQPVKAFKIHNRIWVIPERDT |
| | (K11R, K41R, K212R, | FTNPEEGDLNPPPEAKQVPVSYYDSTYLSTDNEKDNYLKGVTKLFERIYSTDL |
| | K272R, K289R, K291R, | GRMLLTSIVRGIPFWGGSTIDTELKVIDTNCINVIQPDGSYRSEELNLVIIGPS |
| | K299R, K318R, K335R, | ADIIQFECKSFGHEVLNLTRNGYGSTQYIRFSPDFTFGFEESLEVDTNPLLGA |
| | K337R, K340R, K343R, | GRFATDPAVTLAHELIHAGHRLYGIAINPNRVFKVNTNAYYEMSGLEVSFEE |
| | K356R, K375R, K381R, | LRTFGGHDARFIDSLQENEFRLYYYNRFRDIASTLNRAKSIVGTTASLQYMK |
| | K415R) | NVFREKYLLSEDTSGKFSVDRLRFDRLYRMLTEIYTEDNFVRFFKVLNRKTYL |
| | | NFDKAVFRINIVPRVNYTIYDGFNLRNTNLAANFNGQNTEINNMNFTRLK |
| | | NFTGLFEFYKLLCVRGIITSKTKSLDKGYNKALNDLCIKVNNWDLFFSPSEDN |
| | | FTNDLNKGEEITSDTNIEAAEENISLDLIQQYYLTFNFDNEPENISIENLSSDII |
| | | GQLELMPNIERFPNGKKYELDKYTMFHYLRAQEFEHGKSRIALTNSVNEALL |
| | | NPSRVYTFFSSDYVKKVNKATEAAMFLGWVEQLVYDFTDETSEVSTTDKIA |
| | | DITIIIPYIGPALNIGNMLYKDDFVGALIFSGAVILLEFIPEIAIPVLGTFALVSYI |
| | | ANKVLTVQTIDNALSKRNEKWDEVYKYIVTNWLAKVNTQIDLIRKKMKEAL |
| | | ENQAEATKAIINYQYNQYTEEEKNNINFNIDDLSSKLNESINKAMININKFLN |
| | | QCSVSYLMNSMIPYGVKRLEDFDASLKDALLKYIYDNRGTLIGQVDRLKDKV |
| | | NNTLSTDIPFQLSKYVDNQRLLSTFTEYIKN |
| 78 | LC-Hn BoNT/A2-WT | MPFVNKQFNYKDPVNGVDIAYIKIPNAGQMQPVKAFKIHNKIWVIPERDT |
| | | FTNPEEGDLNPPPEAKQVPVSYYDSTYLSTDNEKDNYLKGVTKLFERIYSTDL |
| | | GRMLLTSIVRGIPFWGGSTIDTELKVIDTNCINVIQPDGSYRSEELNLVIIGPS |
| | | ADIIQFECKSFGHDVLNLTRNGYGSTQYIRFSPDFTFGFEESLEVDTNPLLGA |
| | | GKFATDPAVTLAHELIHAEHRLYGIAINPNRVFKVNTNAYYEMSGLEVSFEE |
| | | LRTFGGHDAKFIDSLQENEFRLYYYNKFKDVASTLNKAKSIIGTTASLQYMK |
| | | NVFKEKYLLSEDTSGKFSVDKLKFDKLYKMLTEIYTEDNFVNFFKVINRKTYL |
| | | NFDKAVFRINIVPDENYTIKDGFNLKGANLSTNFNGQNTEINSRNFTRLKNF |
| | | TGLFEFYKLLCVRGIIPFKTKSLDEGYNKALNDLCIKVNNWDLFFSPSEDNFT |
| | | NDLDKVEEITADTNIEAAEENISLDLIQQYYLTFDFDNEPENISIENLSSDIIGQ |
| | | LEPMPNIERFPNGKKYELDKYTMFHYLRAQEFEHGDSRIILTNSAEEALLKP |
| | | NVAYTFFSSKYVKKINKAVEAFMFLNWAEELVYDFTDETNEVTTMDKIADI |
| | | TIIVPYIGPALNIGNMLSKGEFVEAIIFTGVVAMLEFIPEYALPVFGTFAIVSYI |
| | | ANKVLTVQTINNALSKRNEKWDEVYKYTVTNWLAKVNTQIDLIREKMKKA |
| | | LENQAEATKAIINYQYNQYTEEEKNNINFNIDDLSSKLNESINSAMININKFL |
| | | DQCSVSYLMNSMIPYAVKRLKDFDASVRDVLLKYIYDNRGTLVLQVDRLKD |
| | | EVNNTLSADIPFQLSKYVDNKKLLSTFTEYIKN |
| 79 | LC-Hn BoNT/A2-K11R | MPFVNKQFNYRDPVNGVDIAYIKIPNAGQMQPVKAFKIHNKIWVIPERDT |
| | | FTNPEEGDLNPPPEAKQVPVSYYDSTYLSTDNEKDNYLKGVTKLFERIYSTDL |
| | | GRMLLTSIVRGIPFWGGSTIDTELKVIDTNCINVIQPDGSYRSEELNLVIIGPS |
| | | ADIIQFECKSFGHDVLNLTRNGYGSTQYIRFSPDFTFGFEESLEVDTNPLLGA |
| | | GKFATDPAVTLAHELIHAEHRLYGIAINPNRVFKVNTNAYYEMSGLEVSFEE |
| | | LRTFGGHDAKFIDSLQENEFRLYYYNKFKDVASTLNKAKSIIGTTASLQYMK |
| | | NVFKEKYLLSEDTSGKFSVDKLKFDKLYKMLTEIYTEDNFVNFFKVINRKTYL |
| | | NFDKAVFRINIVPDENYTIKDGFNLKGANLSTNFNGQNTEINSRNFTRLKNF |
| | | TGLFEFYKLLCVRGIIPFKTKSLDEGYNKALNDLCIKVNNWDLFFSPSEDNFT |
| | | NDLDKVEEITADTNIEAAEENISLDLIQQYYLTFDFDNEPENISIENLSSDIIGQ |
| | | LEPMPNIERFPNGKKYELDKYTMFHYLRAQEFEHGDSRIILTNSAEEALLKP |
| | | NVAYTFFSSKYVKKINKAVEAFMFLNWAEELVYDFTDETNEVTTMDKIADI |
| | | TIIVPYIGPALNIGNMLSKGEFVEAIIFTGVVAMLEFIPEYALPVFGTFAIVSYI |
| | | ANKVLTVQTINNALSKRNEKWDEVYKYTVTNWLAKVNTQIDLIREKMKKA |
| | | LENQAEATKAIINYQYNQYTEEEKNNINFNIDDLSSKLNESINSAMININKFL |
| | | DQCSVSYLMNSMIPYAVKRLKDFDASVRDVLLKYIYDNRGTLVLQVDRLKD |
| | | EVNNTLSADIPFQLSKYVDNKKLLSTFTEYIKN |
| 80 | LC-Hn BoNT/A2- | MPFVNKQFNYKDPVNGVDIAYIKIPNAGQMQPVKAFKIHNKIWVIPERDT |
| | K289R | FTNPEEGDLNPPPEAKQVPVSYYDSTYLSTDNEKDNYLKGVTKLFERIYSTDL |
| | | GRMLLTSIVRGIPFWGGSTIDTELKVIDTNCINVIQPDGSYRSEELNLVIIGPS |
| | | ADIIQFECKSFGHDVLNLTRNGYGSTQYIRFSPDFTFGFEESLEVDTNPLLGA |
| | | GKFATDPAVTLAHELIHAEHRLYGIAINPNRVFKVNTNAYYEMSGLEVSFEE |
| | | LRTFGGHDAKFIDSLQENEFRLYYYNRFKDVASTLNKAKSIIGTTASLQYMK |
| | | NVFKEKYLLSEDTSGKFSVDKLKFDKLYKMLTEIYTEDNFVNFFKVINRKTYL |
| | | NFDKAVFRINIVPDENYTIKDGFNLKGANLSTNFNGQNTEINSRNFTRLKNF |
| | | TGLFEFYKLLCVRGIIPFKTKSLDEGYNKALNDLCIKVNNWDLFFSPSEDNFT |
| | | NDLDKVEEITADTNIEAAEENISLDLIQQYYLTFDFDNEPENISIENLSSDIIGQ |
| | | LEPMPNIERFPNGKKYELDKYTMFHYLRAQEFEHGDSRIILTNSAEEALLKP |
| | | NVAYTFFSSKYVKKINKAVEAFMFLNWAEELVYDFTDETNEVTTMDKIADI |
| | | TIIVPYIGPALNIGNMLSKGEFVEAIIFTGVVAMLEFIPEYALPVFGTFAIVSYI |
| | | ANKVLTVQTINNALSKRNEKWDEVYKYTVTNWLAKVNTQIDLIREKMKKA |
| | | LENQAEATKAIINYQYNQYTEEEKNNINFNIDDLSSKLNESINSAMININKFL |
| | | DQCSVSYLMNSMIPYAVKRLKDFDASVRDVLLKYIYDNRGTLVLQVDRLKD |
| | | EVNNTLSADIPFQLSKYVDNKKLLSTFTEYIKN |
| 81 | LC-Hn BoNT/A2- | MPFVNKQFNYKDPVNGVDIAYIKIPNAGQMQPVKAFKIHNKIWVIPERDT |
| | K291R | FTNPEEGDLNPPPEAKQVPVSYYDSTYLSTDNEKDNYLKGVTKLFERIYSTDL |
| | | GRMLLTSIVRGIPFWGGSTIDTELKVIDTNCINVIQPDGSYRSEELNLVIIGPS |
| | | ADIIQFECKSFGHDVLNLTRNGYGSTQYIRFSPDFTFGFEESLEVDTNPLLGA |
| | | GKFATDPAVTLAHELIHAEHRLYGIAINPNRVFKVNTNAYYEMSGLEVSFEE |
| | | LRTFGGHDAKFIDSLQENEFRLYYYNKFRDVASTLNKAKSIIGTTASLQYMK |
| | | NVFKEKYLLSEDTSGKFSVDKLKFDKLYKMLTEIYTEDNFVNFFKVINRKTYL |
| | | NFDKAVFRINIVPDENYTIKDGFNLKGANLSTNFNGQNTEINSRNFTRLKNF |
| | | TGLFEFYKLLCVRGIIPFKTKSLDEGYNKALNDLCIKVNNWDLFFSPSEDNFT |
| | | NDLDKVEEITADTNIEAAEENISLDLIQQYYLTFDFDNEPENISIENLSSDIIGQ |
| | | LEPMPNIERFPNGKKYELDKYTMFHYLRAQEFEHGDSRIILTNSAEEALLKP |
| | | NVAYTFFSSKYVKKINKAVEAFMFLNWAEELVYDFTDETNEVTTMDKIADI |
| | | TIIVPYIGPALNIGNMLSKGEFVEAIIFTGVVAMLEFIPEYALPVFGTFAIVSYI |
| | | ANKVLTVQTINNALSKRNEKWDEVYKYTVTNWLAKVNTQIDLIREKMKKA |
| | | LENQAEATKAIINYQYNQYTEEEKNNINFNIDDLSSKLNESINSAMININKFL |
| | | DQCSVSYLMNSMIPYAVKRLKDFDASVRDVLLKYIYDNRGTLVLQVDRLKD |
| | | EVNNTLSADIPFQLSKYVDNKKLLSTFTEYIKN |
| 82 | LC-Hn BoNT/A2- | MPFVNKQFNYKDPVNGVDIAYIKIPNAGQMQPVKAFKIHNKIWVIPERDT |
| | K299R | FTNPEEGDLNPPPEAKQVPVSYYDSTYLSTDNEKDNYLKGVTKLFERIYSTDL |
| | | GRMLLTSIVRGIPFWGGSTIDTELKVIDTNCINVIQPDGSYRSEELNLVIIGPS |
| | | ADIIQFECKSFGHDVLNLTRNGYGSTQYIRFSPDFTFGFEESLEVDTNPLLGA |
| | | GKFATDPAVTLAHELIHAEHRLYGIAINPNRVFKVNTNAYYEMSGLEVSFEE |
| | | LRTFGGHDAKFIDSLQENEFRLYYYNKFKDVASTLNRAKSIIGTTASLQYMK |
| | | NVFKEKYLLSEDTSGKFSVDKLKFDKLYKMLTEIYTEDNFVNFFKVINRKTYL |
| | | NFDKAVFRINIVPDENYTIKDGFNLKGANLSTNFNGQNTEINSRNFTRLKNF |
| | | TGLFEFYKLLCVRGIIPFKTKSLDEGYNKALNDLCIKVNNWDLFFSPSEDNFT |
| | | NDLDKVEEITADTNIEAAEENISLDLIQQYYLTFDFDNEPENISIENLSSDIIGQ |
| | | LEPMPNIERFPNGKKYELDKYTMFHYLRAQEFEHGDSRIILTNSAEEALLKP |
| | | NVAYTFFSSKYVKKINKAVEAFMFLNWAEELVYDFTDETNEVTTMDKIADI |
| | | TIIVPYIGPALNIGNMLSKGEFVEAIIFTGVVAMLEFIPEYALPVFGTFAIVSYI |
| | | ANKVLTVQTINNALSKRNEKWDEVYKYTVTNWLAKVNTQIDLIREKMKKA |
| | | LENQAEATKAIINYQYNQYTEEEKNNINFNIDDLSSKLNESINSAMININKFL |
| | | DQCSVSYLMNSMIPYAVKRLKDFDASVRDVLLKYIYDNRGTLVLQVDRLKD |
| | | EVNNTLSADIPFQLSKYVDNKKLLSTFTEYIKN |
| 83 | LC-Hn BoNT/A2- | MPFVNKQFNYKDPVNGVDIAYIKIPNAGQMQPVKAFKIHNKIWVIPERDT |
| | K335R | FTNPEEGDLNPPPEAKQVPVSYYDSTYLSTDNEKDNYLKGVTKLFERIYSTDL |
| | | GRMLLTSIVRGIPFWGGSTIDTELKVIDTNCINVIQPDGSYRSEELNLVIIGPS |
| | | ADIIQFECKSFGHDVLNLTRNGYGSTQYIRFSPDFTFGFEESLEVDTNPLLGA |
| | | GKFATDPAVTLAHELIHAEHRLYGIAINPNRVFKVNTNAYYEMSGLEVSFEE |
| | | LRTFGGHDAKFIDSLQENEFRLYYYNKFKDVASTLNKAKSIIGTTASLQYMK |
| | | NVFKEKYLLSEDTSGKFSVDRLKFDKLYKMLTEIYTEDNFVNFFKVINRKTYL |
| | | NFDKAVFRINIVPDENYTIKDGFNLKGANLSTNFNGQNTEINSRNFTRLKNF |
| | | TGLFEFYKLLCVRGIIPFKTKSLDEGYNKALNDLCIKVNNWDLFFSPSEDNFT |
| | | NDLDKVEEITADTNIEAAEENISLDLIQQYYLTFDFDNEPENISIENLSSDIIGQ |
| | | LEPMPNIERFPNGKKYELDKYTMFHYLRAQEFEHGDSRIILTNSAEEALLKP |
| | | NVAYTFFSSKYVKKINKAVEAFMFLNWAEELVYDFTDETNEVTTMDKIADI |
| | | TIIVPYIGPALNIGNMLSKGEFVEAIIFTGVVAMLEFIPEYALPVFGTFAIVSYI |
| | | ANKVLTVQTINNALSKRNEKWDEVYKYTVTNWLAKVNTQIDLIREKMKKA |
| | | LENQAEATKAIINYQYNQYTEEEKNNINFNIDDLSSKLNESINSAMININKFL |
| | | DQCSVSYLMNSMIPYAVKRLKDFDASVRDVLLKYIYDNRGTLVLQVDRLKD |
| | | EVNNTLSADIPFQLSKYVDNKKLLSTFTEYIKN |
| 84 | LC-Hn BoNT/A2- | MPFVNKQFNYKDPVNGVDIAYIKIPNAGQMQPVKAFKIHNKIWVIPERDT |
| | K337R | FTNPEEGDLNPPPEAKQVPVSYYDSTYLSTDNEKDNYLKGVTKLFERIYSTDL |
| | | GRMLLTSIVRGIPFWGGSTIDTELKVIDTNCINVIQPDGSYRSEELNLVIIGPS |
| | | ADIIQFECKSFGHDVLNLTRNGYGSTQYIRFSPDFTFGFEESLEVDTNPLLGA |
| | | GKFATDPAVTLAHELIHAEHRLYGIAINPNRVFKVNTNAYYEMSGLEVSFEE |
| | | LRTFGGHDAKFIDSLQENEFRLYYYNKFKDVASTLNKAKSIIGTTASLQYMK |
| | | NVFKEKYLLSEDTSGKFSVDKLRFDKLYKMLTEIYTEDNFVNFFKVINRKTYL |
| | | NFDKAVFRINIVPDENYTIKDGFNLKGANLSTNFNGQNTEINSRNFTRLKNF |
| | | TGLFEFYKLLCVRGIIPFKTKSLDEGYNKALNDLCIKVNNWDLFFSPSEDNFT |
| | | NDLDKVEEITADTNIEAAEENISLDLIQQYYLTFDFDNEPENISIENLSSDIIGQ |
| | | LEPMPNIERFPNGKKYELDKYTMFHYLRAQEFEHGDSRIILTNSAEEALLKP |
| | | NVAYTFFSSKYVKKINKAVEAFMFLNWAEELVYDFTDETNEVTTMDKIADI |
| | | TIIVPYIGPALNIGNMLSKGEFVEAIIFTGVVAMLEFIPEYALPVFGTFAIVSYI |
| | | ANKVLTVQTINNALSKRNEKWDEVYKYTVTNWLAKVNTQIDLIREKMKKA |
| | | LENQAEATKAIINYQYNQYTEEEKNNINFNIDDLSSKLNESINSAMININKFL |
| | | DQCSVSYLMNSMIPYAVKRLKDFDASVRDVLLKYIYDNRGTLVLQVDRLKD |
| | | EVNNTLSADIPFQLSKYVDNKKLLSTFTEYIKN |
| 85 | LC-Hn BoNT/A2- | MPFVNKQFNYKDPVNGVDIAYIKIPNAGQMQPVKAFKIHNKIWVIPERDT |
| | K343R | FTNPEEGDLNPPPEAKQVPVSYYDSTYLSTDNEKDNYLKGVTKLFERIYSTDL |
| | | GRMLLTSIVRGIPFWGGSTIDTELKVIDTNCINVIQPDGSYRSEELNLVIIGPS |
| | | ADIIQFECKSFGHDVLNLTRNGYGSTQYIRFSPDFTFGFEESLEVDTNPLLGA |
| | | GKFATDPAVTLAHELIHAEHRLYGIAINPNRVFKVNTNAYYEMSGLEVSFEE |
| | | LRTFGGHDAKFIDSLQENEFRLYYYNKFKDVASTLNKAKSIIGTTASLQYMK |
| | | NVFKEKYLLSEDTSGKFSVDKLKFDKLYRMLTEIYTEDNFVNFFKVINRKTYL |
| | | NFDKAVFRINIVPDENYTIKDGFNLKGANLSTNFNGQNTEINSRNFTRLKNF |
| | | TGLFEFYKLLCVRGIIPFKTKSLDEGYNKALNDLCIKVNNWDLFFSPSEDNFT |
| | | NDLDKVEEITADTNIEAAEENISLDLIQQYYLTFDFDNEPENISIENLSSDIIGQ |
| | | LEPMPNIERFPNGKKYELDKYTMFHYLRAQEFEHGDSRIILTNSAEEALLKP |
| | | NVAYTFFSSKYVKKINKAVEAFMFLNWAEELVYDFTDETNEVTTMDKIADI |
| | | TIIVPYIGPALNIGNMLSKGEFVEAIIFTGVVAMLEFIPEYALPVFGTFAIVSYI |
| | | ANKVLTVQTINNALSKRNEKWDEVYKYTVTNWLAKVNTQIDLIREKMKKA |
| | | LENQAEATKAIINYQYNQYTEEEKNNINFNIDDLSSKLNESINSAMININKFL |
| | | DQCSVSYLMNSMIPYAVKRLKDFDASVRDVLLKYIYDNRGTLVLQVDRLKD |
| | | EVNNTLSADIPFQLSKYVDNKKLLSTFTEYIKN |
| 86 | LC-Hn BoNT/A2-KR7 | MPFVNKQFNYRDPVNGVDIAYIKIPNAGQMQPVKAFKIHNKIWVIPERDT |
| | (K11R, K289R, K291R, | FTNPEEGDLNPPPEAKQVPVSYYDSTYLSTDNEKDNYLKGVTKLFERIYSTDL |
| | K299R, K335R, K337R, | GRMLLTSIVRGIPFWGGSTIDTELKVIDTNCINVIQPDGSYRSEELNLVIIGPS |
| | K343R) | ADIIQFECKSFGHDVLNLTRNGYGSTQYIRFSPDFTFGFEESLEVDTNPLLGA |
| | | GKFATDPAVTLAHELIHAEHRLYGIAINPNRVFKVNTNAYYEMSGLEVSFEE |
| | | LRTFGGHDAKFIDSLQENEFRLYYYNRFRDVASTLNRAKSIIGTTASLQYMK |
| | | NVFKEKYLLSEDTSGKFSVDRLRFDKLYRMLTEIYTEDNFVNFFKVINRKTYL |
| | | NFDKAVFRINIVPDENYTIKDGFNLKGANLSTNFNGQNTEINSRNFTRLKNF |
| | | TGLFEFYKLLCVRGIIPFKTKSLDEGYNKALNDLCIKVNNWDLFFSPSEDNFT |
| | | NDLDKVEEITADTNIEAAEENISLDLIQQYYLTFDFDNEPENISIENLSSDIIGQ |
| | | LEPMPNIERFPNGKKYELDKYTMFHYLRAQEFEHGDSRIILTNSAEEALLKP |
| | | NVAYTFFSSKYVKKINKAVEAFMFLNWAEELVYDFTDETNEVTTMDKIADI |
| | | TIIVPYIGPALNIGNMLSKGEFVEAIIFTGVVAMLEFIPEYALPVFGTFAIVSYI |
| | | ANKVLTVQTINNALSKRNEKWDEVYKYTVTNWLAKVNTQIDLIREKMKKA |
| | | LENQAEATKAIINYQYNQYTEEEKNNINFNIDDLSSKLNESINSAMININKFL |
| | | DQCSVSYLMNSMIPYAVKRLKDFDASVRDVLLKYIYDNRGTLVLQVDRLKD |
| | | EVNNTLSADIPFQLSKYVDNKKLLSTFTEYIKN |
| 87 | LC BoNT/A1-WT | MPFVNKQFNYKDPVNGVDIAYIKIPNAGQMQPVKAFKIHNKIWVIPERDT |
| | | FTNPEEGDLNPPPEAKQVPVSYYDSTYLSTDNEKDNYLKGVTKLFERIYSTDL |
| | | GRMLLTSIVRGIPFWGGSTIDTELKVIDTNCINVIQPDGSYRSEELNLVIIGPS |
| | | ADIIQFECKSFGHEVLNLTRNGYGSTQYIRFSPDFTFGFEESLEVDTNPLLGA |
| | | GKFATDPAVTLAHELIHAGHRLYGIAINPNRVFKVNTNAYYEMSGLEVSFEE |
| | | LRTFGGHDAKFIDSLQENEFRLYYYNKFKDIASTLNKAKSIVGTTASLQYMK |
| | | NVFKEKYLLSEDTSGKFSVDKLKFDKLYKMLTEIYTEDNFVKFFKVLNRKTYL |
| | | NFDKAVFKINIVPKVNYTIYDGFNLRNTNLAANFNGQNTEINNMNFTKLKN |
| | | FTGLFEFYKLLCVRGIITSKTKS |
| 88 | LC BoNT/A1-K11R | MPFVNKQFNYRDPVNGVDIAYIKIPNAGQMQPVKAFKIHNKIWVIPERDT |
| | | FTNPEEGDLNPPPEAKQVPVSYYDSTYLSTDNEKDNYLKGVTKLFERIYSTDL |
| | | GRMLLTSIVRGIPFWGGSTIDTELKVIDTNCINVIQPDGSYRSEELNLVIIGPS |
| | | ADIIQFECKSFGHEVLNLTRNGYGSTQYIRFSPDFTFGFEESLEVDTNPLLGA |
| | | GKFATDPAVTLAHELIHAGHRLYGIAINPNRVFKVNTNAYYEMSGLEVSFEE |
| | | LRTFGGHDAKFIDSLQENEFRLYYYNKFKDIASTLNKAKSIVGTTASLQYMK |
| | | NVFKEKYLLSEDTSGKFSVDKLKFDKLYKMLTEIYTEDNFVKFFKVLNRKTYL |
| | | NFDKAVFKINIVPKVNYTIYDGFNLRNTNLAANFNGQNTEINNMNFTKLKN |
| | | FTGLFEFYKLLCVRGIITSKTKS |
| 89 | LC BoNT/A1-K41R | MPFVNKQFNYKDPVNGVDIAYIKIPNAGQMQPVKAFKIHNRIWVIPERDT |
| | | FTNPEEGDLNPPPEAKQVPVSYYDSTYLSTDNEKDNYLKGVTKLFERIYSTDL |
| | | GRMLLTSIVRGIPFWGGSTIDTELKVIDTNCINVIQPDGSYRSEELNLVIIGPS |
| | | ADIIQFECKSFGHEVLNLTRNGYGSTQYIRFSPDFTFGFEESLEVDTNPLLGA |
| | | GKFATDPAVTLAHELIHAGHRLYGIAINPNRVFKVNTNAYYEMSGLEVSFEE |
| | | LRTFGGHDAKFIDSLQENEFRLYYYNKFKDIASTLNKAKSIVGTTASLQYMK |
| | | NVFKEKYLLSEDTSGKFSVDKLKFDKLYKMLTEIYTEDNFVKFFKVLNRKTYL |
| | | NFDKAVFKINIVPKVNYTIYDGFNLRNTNLAANFNGQNTEINNMNFTKLKN |
| | | FTGLFEFYKLLCVRGIITSKTKS |
| 90 | LC BoNT/A1-K212R | MPFVNKQFNYKDPVNGVDIAYIKIPNAGQMQPVKAFKIHNKIWVIPERDT |
| | | FTNPEEGDLNPPPEAKQVPVSYYDSTYLSTDNEKDNYLKGVTKLFERIYSTDL |
| | | GRMLLTSIVRGIPFWGGSTIDTELKVIDTNCINVIQPDGSYRSEELNLVIIGPS |
| | | ADIIQFECKSFGHEVLNLTRNGYGSTQYIRFSPDFTFGFEESLEVDTNPLLGA |
| | | GRFATDPAVTLAHELIHAGHRLYGIAINPNRVFKVNTNAYYEMSGLEVSFEE |
| | | LRTFGGHDAKFIDSLQENEFRLYYYNKFKDIASTLNKAKSIVGTTASLQYMK |
| | | NVFKEKYLLSEDTSGKFSVDKLKFDKLYKMLTEIYTEDNFVKFFKVLNRKTYL |
| | | NFDKAVFKINIVPKVNYTIYDGFNLRNTNLAANFNGQNTEINNMNFTKLKN |
| | | FTGLFEFYKLLCVRGIITSKTKS |
| 91 | LC BoNT/A1-K272R | MPFVNKQFNYKDPVNGVDIAYIKIPNAGQMQPVKAFKIHNKIWVIPERDT |
| | | FTNPEEGDLNPPPEAKQVPVSYYDSTYLSTDNEKDNYLKGVTKLFERIYSTDL |
| | | GRMLLTSIVRGIPFWGGSTIDTELKVIDTNCINVIQPDGSYRSEELNLVIIGPS |
| | | ADIIQFECKSFGHEVLNLTRNGYGSTQYIRFSPDFTFGFEESLEVDTNPLLGA |
| | | GKFATDPAVTLAHELIHAGHRLYGIAINPNRVFKVNTNAYYEMSGLEVSFEE |
| | | LRTFGGHDARFIDSLQENEFRLYYYNKFKDIASTLNKAKSIVGTTASLQYMK |
| | | NVFKEKYLLSEDTSGKFSVDKLKFDKLYKMLTEIYTEDNFVKFFKVLNRKTYL |
| | | NFDKAVFKINIVPKVNYTIYDGFNLRNTNLAANFNGQNTEINNMNFTKLKN |
| | | FTGLFEFYKLLCVRGIITSKTKS |
| 92 | LC BoNT/A1-K289R | MPFVNKQFNYKDPVNGVDIAYIKIPNAGQMQPVKAFKIHNKIWVIPERDT |
| | | FTNPEEGDLNPPPEAKQVPVSYYDSTYLSTDNEKDNYLKGVTKLFERIYSTDL |
| | | GRMLLTSIVRGIPFWGGSTIDTELKVIDTNCINVIQPDGSYRSEELNLVIIGPS |
| | | ADIIQFECKSFGHEVLNLTRNGYGSTQYIRFSPDFTFGFEESLEVDTNPLLGA |
| | | GKFATDPAVTLAHELIHAGHRLYGIAINPNRVFKVNTNAYYEMSGLEVSFEE |
| | | LRTFGGHDAKFIDSLQENEFRLYYYNRFKDIASTLNKAKSIVGTTASLQYMK |
| | | NVFKEKYLLSEDTSGKFSVDKLKFDKLYKMLTEIYTEDNFVKFFKVLNRKTYL |
| | | NFDKAVFKINIVPKVNYTIYDGFNLRNTNLAANFNGQNTEINNMNFTKLKN |
| | | FTGLFEFYKLLCVRGIITSKTKS |
| 93 | LC BoNT/A1-K291R | MPFVNKQFNYKDPVNGVDIAYIKIPNAGQMQPVKAFKIHNKIWVIPERDT |
| | | FTNPEEGDLNPPPEAKQVPVSYYDSTYLSTDNEKDNYLKGVTKLFERIYSTDL |
| | | GRMLLTSIVRGIPFWGGSTIDTELKVIDTNCINVIQPDGSYRSEELNLVIIGPS |
| | | ADIIQFECKSFGHEVLNLTRNGYGSTQYIRFSPDFTFGFEESLEVDTNPLLGA |
| | | GKFATDPAVTLAHELIHAGHRLYGIAINPNRVFKVNTNAYYEMSGLEVSFEE |
| | | LRTFGGHDAKFIDSLQENEFRLYYYNKFRDIASTLNKAKSIVGTTASLQYMK |
| | | NVFKEKYLLSEDTSGKFSVDKLKFDKLYKMLTEIYTEDNFVKFFKVLNRKTYL |
| | | NFDKAVFKINIVPKVNYTIYDGFNLRNTNLAANFNGQNTEINNMNFTKLKN |
| | | FTGLFEFYKLLCVRGIITSKTKS |
| 94 | LC BoNT/A1-K299R | MPFVNKQFNYKDPVNGVDIAYIKIPNAGQMQPVKAFKIHNKIWVIPERDT |
| | | FTNPEEGDLNPPPEAKQVPVSYYDSTYLSTDNEKDNYLKGVTKLFERIYSTDL |
| | | GRMLLTSIVRGIPFWGGSTIDTELKVIDTNCINVIQPDGSYRSEELNLVIIGPS |
| | | ADIIQFECKSFGHEVLNLTRNGYGSTQYIRFSPDFTFGFEESLEVDTNPLLGA |
| | | GKFATDPAVTLAHELIHAGHRLYGIAINPNRVFKVNTNAYYEMSGLEVSFEE |
| | | LRTFGGHDAKFIDSLQENEFRLYYYNKFKDIASTLNRAKSIVGTTASLQYMK |
| | | NVFKEKYLLSEDTSGKFSVDKLKFDKLYKMLTEIYTEDNFVKFFKVLNRKTYL |
| | | NFDKAVFKINIVPKVNYTIYDGFNLRNTNLAANFNGQNTEINNMNFTKLKN |
| | | FTGLFEFYKLLCVRGIITSKTKS |
| 95 | LC BoNT/A1-K318R | MPFVNKQFNYKDPVNGVDIAYIKIPNAGQMQPVKAFKIHNKIWVIPERDT |
| | | FTNPEEGDLNPPPEAKQVPVSYYDSTYLSTDNEKDNYLKGVTKLFERIYSTDL |
| | | GRMLLTSIVRGIPFWGGSTIDTELKVIDTNCINVIQPDGSYRSEELNLVIIGPS |
| | | ADIIQFECKSFGHEVLNLTRNGYGSTQYIRFSPDFTFGFEESLEVDTNPLLGA |
| | | GKFATDPAVTLAHELIHAGHRLYGIAINPNRVFKVNTNAYYEMSGLEVSFEE |
| | | LRTFGGHDAKFIDSLQENEFRLYYYNKFKDIASTLNKAKSIVGTTASLQYMK |
| | | NVFREKYLLSEDTSGKFSVDKLKFDKLYKMLTEIYTEDNFVKFFKVLNRKTYL |
| | | NFDKAVFKINIVPKVNYTIYDGFNLRNTNLAANFNGQNTEINNMNFTKLKN |
| | | FTGLFEFYKLLCVRGIITSKTKS |
| 96 | LC BoNT/A1-K335R | MPFVNKQFNYKDPVNGVDIAYIKIPNAGQMQPVKAFKIHNKIWVIPERDT |
| | | FTNPEEGDLNPPPEAKQVPVSYYDSTYLSTDNEKDNYLKGVTKLFERIYSTDL |
| | | GRMLLTSIVRGIPFWGGSTIDTELKVIDTNCINVIQPDGSYRSEELNLVIIGPS |
| | | ADIIQFECKSFGHEVLNLTRNGYGSTQYIRFSPDFTFGFEESLEVDTNPLLGA |
| | | GKFATDPAVTLAHELIHAGHRLYGIAINPNRVFKVNTNAYYEMSGLEVSFEE |
| | | LRTFGGHDAKFIDSLQENEFRLYYYNKFKDIASTLNKAKSIVGTTASLQYMK |
| | | NVFKEKYLLSEDTSGKFSVDRLKFDKLYKMLTEIYTEDNFVKFFKVLNRKTYL |
| | | NFDKAVFKINIVPKVNYTIYDGFNLRNTNLAANFNGQNTEINNMNFTKLKN |
| | | FTGLFEFYKLLCVRGIITSKTKS |
| 97 | LC BoNT/A1-K337R | MPFVNKQFNYKDPVNGVDIAYIKIPNAGQMQPVKAFKIHNKIWVIPERDT |
| | | FTNPEEGDLNPPPEAKQVPVSYYDSTYLSTDNEKDNYLKGVTKLFERIYSTDL |
| | | GRMLLTSIVRGIPFWGGSTIDTELKVIDTNCINVIQPDGSYRSEELNLVIIGPS |
| | | ADIIQFECKSFGHEVLNLTRNGYGSTQYIRFSPDFTFGFEESLEVDTNPLLGA |
| | | GKFATDPAVTLAHELIHAGHRLYGIAINPNRVFKVNTNAYYEMSGLEVSFEE |
| | | LRTFGGHDAKFIDSLQENEFRLYYYNKFKDIASTLNKAKSIVGTTASLQYMK |
| | | NVFKEKYLLSEDTSGKFSVDKLRFDKLYKMLTEIYTEDNFVKFFKVLNRKTYL |
| | | NFDKAVFKINIVPKVNYTIYDGFNLRNTNLAANFNGQNTEINNMNFTKLKN |
| | | FTGLFEFYKLLCVRGIITSKTKS |
| 98 | LC BoNT/A1-K340R | MPFVNKQFNYKDPVNGVDIAYIKIPNAGQMQPVKAFKIHNKIWVIPERDT |
| | | FTNPEEGDLNPPPEAKQVPVSYYDSTYLSTDNEKDNYLKGVTKLFERIYSTDL |
| | | GRMLLTSIVRGIPFWGGSTIDTELKVIDTNCINVIQPDGSYRSEELNLVIIGPS |
| | | ADIIQFECKSFGHEVLNLTRNGYGSTQYIRFSPDFTFGFEESLEVDTNPLLGA |
| | | GKFATDPAVTLAHELIHAGHRLYGIAINPNRVFKVNTNAYYEMSGLEVSFEE |
| | | LRTFGGHDAKFIDSLQENEFRLYYYNKFKDIASTLNKAKSIVGTTASLQYMK |
| | | NVFKEKYLLSEDTSGKFSVDKLKFDRLYKMLTEIYTEDNFVKFFKVLNRKTYL |
| | | NFDKAVFKINIVPKVNYTIYDGFNLRNTNLAANFNGQNTEINNMNFTKLKN |
| | | FTGLFEFYKLLCVRGIITSKTKS |
| 99 | LC BoNT/A1-K343R | MPFVNKQFNYKDPVNGVDIAYIKIPNAGQMQPVKAFKIHNKIWVIPERDT |
| | | FTNPEEGDLNPPPEAKQVPVSYYDSTYLSTDNEKDNYLKGVTKLFERIYSTDL |
| | | GRMLLTSIVRGIPFWGGSTIDTELKVIDTNCINVIQPDGSYRSEELNLVIIGPS |
| | | ADIIQFECKSFGHEVLNLTRNGYGSTQYIRFSPDFTFGFEESLEVDTNPLLGA |
| | | GKFATDPAVTLAHELIHAGHRLYGIAINPNRVFKVNTNAYYEMSGLEVSFEE |
| | | LRTFGGHDAKFIDSLQENEFRLYYYNKFKDIASTLNKAKSIVGTTASLQYMK |
| | | NVFKEKYLLSEDTSGKFSVDKLKFDKLYRMLTEIYTEDNFVKFFKVLNRKTYL |
| | | NFDKAVFKINIVPKVNYTIYDGFNLRNTNLAANFNGQNTEINNMNFTKLKN |
| | | FTGLFEFYKLLCVRGIITSKTKS |
| 100 | LC BoNT/A1-K356R | MPFVNKQFNYKDPVNGVDIAYIKIPNAGQMQPVKAFKIHNKIWVIPERDT |
| | | FTNPEEGDLNPPPEAKQVPVSYYDSTYLSTDNEKDNYLKGVTKLFERIYSTDL |
| | | GRMLLTSIVRGIPFWGGSTIDTELKVIDTNCINVIQPDGSYRSEELNLVIIGPS |
| | | ADIIQFECKSFGHEVLNLTRNGYGSTQYIRFSPDFTFGFEESLEVDTNPLLGA |
| | | GKFATDPAVTLAHELIHAGHRLYGIAINPNRVFKVNTNAYYEMSGLEVSFEE |
| | | LRTFGGHDAKFIDSLQENEFRLYYYNKFKDIASTLNKAKSIVGTTASLQYMK |
| | | NVFKEKYLLSEDTSGKFSVDKLKFDKLYKMLTEIYTEDNFVRFFKVLNRKTYL |
| | | NFDKAVFKINIVPKVNYTIYDGFNLRNTNLAANFNGQNTEINNMNFTKLKN |
| | | FTGLFEFYKLLCVRGIITSKTKS |
| 101 | LC BoNT/A1-K375R | MPFVNKQFNYKDPVNGVDIAYIKIPNAGQMQPVKAFKIHNKIWVIPERDT |
| | | FTNPEEGDLNPPPEAKQVPVSYYDSTYLSTDNEKDNYLKGVTKLFERIYSTDL |
| | | GRMLLTSIVRGIPFWGGSTIDTELKVIDTNCINVIQPDGSYRSEELNLVIIGPS |
| | | ADIIQFECKSFGHEVLNLTRNGYGSTQYIRFSPDFTFGFEESLEVDTNPLLGA |
| | | GKFATDPAVTLAHELIHAGHRLYGIAINPNRVFKVNTNAYYEMSGLEVSFEE |
| | | LRTFGGHDAKFIDSLQENEFRLYYYNKFKDIASTLNKAKSIVGTTASLQYMK |
| | | NVFKEKYLLSEDTSGKFSVDKLKFDKLYKMLTEIYTEDNFVKFFKVLNRKTYL |
| | | NFDKAVFRINIVPKVNYTIYDGFNLRNTNLAANFNGQNTEINNMNFTKLKN |
| | | FTGLFEFYKLLCVRGIITSKTKS |
| 102 | LC BoNT/A1-K381R | MPFVNKQFNYKDPVNGVDIAYIKIPNAGQMQPVKAFKIHNKIWVIPERDT |
| | | FTNPEEGDLNPPPEAKQVPVSYYDSTYLSTDNEKDNYLKGVTKLFERIYSTDL |
| | | GRMLLTSIVRGIPFWGGSTIDTELKVIDTNCINVIQPDGSYRSEELNLVIIGPS |
| | | ADIIQFECKSFGHEVLNLTRNGYGSTQYIRFSPDFTFGFEESLEVDTNPLLGA |
| | | GKFATDPAVTLAHELIHAGHRLYGIAINPNRVFKVNTNAYYEMSGLEVSFEE |
| | | LRTFGGHDAKFIDSLQENEFRLYYYNKFKDIASTLNKAKSIVGTTASLQYMK |
| | | NVFKEKYLLSEDTSGKFSVDKLKFDKLYKMLTEIYTEDNFVKFFKVLNRKTYL |
| | | NFDKAVFKINIVPRVNYTIYDGFNLRNTNLAANFNGQNTEINNMNFTKLKN |
| | | FTGLFEFYKLLCVRGIITSKTKS |
| 103 | LC BoNT/A1-Y387R | MPFVNKQFNYKDPVNGVDIAYIKIPNAGQMQPVKAFKIHNKIWVIPERDT |
| | | FTNPEEGDLNPPPEAKQVPVSYYDSTYLSTDNEKDNYLKGVTKLFERIYSTDL |
| | | GRMLLTSIVRGIPFWGGSTIDTELKVIDTNCINVIQPDGSYRSEELNLVIIGPS |
| | | ADIIQFECKSFGHEVLNLTRNGYGSTQYIRFSPDFTFGFEESLEVDTNPLLGA |
| | | GKFATDPAVTLAHELIHAGHRLYGIAINPNRVFKVNTNAYYEMSGLEVSFEE |
| | | LRTFGGHDAKFIDSLQENEFRLYYYNKFKDIASTLNKAKSIVGTTASLQYMK |
| | | NVFKEKYLLSEDTSGKFSVDKLKFDKLYKMLTEIYTEDNFVKFFKVLNRKTYL |
| | | NFDKAVFKINIVPKVNYTIRDGFNLRNTNLAANFNGQNTEINNMNFTKLKN |
| | | FTGLFEFYKLLCVRGIITSKTKS |
| 104 | LC BoNT/A1-M411R | MPFVNKQFNYKDPVNGVDIAYIKIPNAGQMQPVKAFKIHNKIWVIPERDT |
| | | FTNPEEGDLNPPPEAKQVPVSYYDSTYLSTDNEKDNYLKGVTKLFERIYSTDL |
| | | GRMLLTSIVRGIPFWGGSTIDTELKVIDTNCINVIQPDGSYRSEELNLVIIGPS |
| | | ADIIQFECKSFGHEVLNLTRNGYGSTQYIRFSPDFTFGFEESLEVDTNPLLGA |
| | | GKFATDPAVTLAHELIHAGHRLYGIAINPNRVFKVNTNAYYEMSGLEVSFEE |
| | | LRTFGGHDAKFIDSLQENEFRLYYYNKFKDIASTLNKAKSIVGTTASLQYMK |
| | | NVFKEKYLLSEDTSGKFSVDKLKFDKLYKMLTEIYTEDNFVKFFKVLNRKTYL |
| | | NFDKAVFKINIVPKVNYTIYDGFNLRNTNLAANFNGQNTEINNRNFTKLKN |
| | | FTGLFEFYKLLCVRGIITSKTKS |
| 105 | LC BoNT/A1-K415R | MPFVNKQFNYKDPVNGVDIAYIKIPNAGQMQPVKAFKIHNKIWVIPERDT |
| | | FTNPEEGDLNPPPEAKQVPVSYYDSTYLSTDNEKDNYLKGVTKLFERIYSTDL |
| | | GRMLLTSIVRGIPFWGGSTIDTELKVIDTNCINVIQPDGSYRSEELNLVIIGPS |
| | | ADIIQFECKSFGHEVLNLTRNGYGSTQYIRFSPDFTFGFEESLEVDTNPLLGA |
| | | GKFATDPAVTLAHELIHAGHRLYGIAINPNRVFKVNTNAYYEMSGLEVSFEE |
| | | LRTFGGHDAKFIDSLQENEFRLYYYNKFKDIASTLNKAKSIVGTTASLQYMK |
| | | NVFKEKYLLSEDTSGKFSVDKLKFDKLYKMLTEIYTEDNFVKFFKVLNRKTYL |
| | | NFDKAVFKINIVPKVNYTIYDGFNLRNTNLAANFNGQNTEINNMNFTRLKN |
| | | FTGLFEFYKLLCVRGIITSKTKS |
| 106 | LC BoNT/A1-Group 0 | MPFVNKQFNYRDPVNGVDIAYIKIPNAGQMQPVKAFKIHNKIWVIPERDT |
| | (K11R, K335R, K337R, | FTNPEEGDLNPPPEAKQVPVSYYDSTYLSTDNEKDNYLKGVTKLFERIYSTDL |
| | K343R, K375R, K415R) | GRMLLTSIVRGIPFWGGSTIDTELKVIDTNCINVIQPDGSYRSEELNLVIIGPS |
| | | ADIIQFECKSFGHEVLNLTRNGYGSTQYIRFSPDFTFGFEESLEVDTNPLLGA |
| | | GKFATDPAVTLAHELIHAGHRLYGIAINPNRVFKVNTNAYYEMSGLEVSFEE |
| | | LRTFGGHDAKFIDSLQENEFRLYYYNKFKDIASTLNKAKSIVGTTASLQYMK |
| | | NVFKEKYLLSEDTSGKFSVDRLRFDKLYRMLTEIYTEDNFVKFFKVLNRKTYL |
| | | NFDKAVFRINIVPKVNYTIYDGFNLRNTNLAANFNGQNTEINNMNFTRLKN |
| | | FTGLFEFYKLLCVRGIITSKTKS |
| 107 | LC BoNT/A1-Group 1 | MPFVNKQFNYKDPVNGVDIAYIKIPNAGQMQPVKAFKIHNRIWVIPERDT |
| | (K41R, K318R, K340R) | FTNPEEGDLNPPPEAKQVPVSYYDSTYLSTDNEKDNYLKGVTKLFERIYSTDL |
| | | GRMLLTSIVRGIPFWGGSTIDTELKVIDTNCINVIQPDGSYRSEELNLVIIGPS |
| | | ADIIQFECKSFGHEVLNLTRNGYGSTQYIRFSPDFTFGFEESLEVDTNPLLGA |
| | | GKFATDPAVTLAHELIHAGHRLYGIAINPNRVFKVNTNAYYEMSGLEVSFEE |
| | | LRTFGGHDAKFIDSLQENEFRLYYYNKFKDIASTLNKAKSIVGTTASLQYMK |
| | | NVFREKYLLSEDTSGKFSVDKLKFDRLYKMLTEIYTEDNFVKFFKVLNRKTYL |
| | | NFDKAVFKINIVPKVNYTIYDGFNLRNTNLAANFNGQNTEINNMNFTKLKN |
| | | FTGLFEFYKLLCVRGIITSKTKS |
| 108 | LC BoNT/A1-Group 2 | MPFVNKQFNYKDPVNGVDIAYIKIPNAGQMQPVKAFKIHNKIWVIPERDT |
| | (K289R, K291R, | FTNPEEGDLNPPPEAKQVPVSYYDSTYLSTDNEKDNYLKGVTKLFERIYSTDL |
| | K299R, K381R) | GRMLLTSIVRGIPFWGGSTIDTELKVIDTNCINVIQPDGSYRSEELNLVIIGPS |
| | | ADIIQFECKSFGHEVLNLTRNGYGSTQYIRFSPDFTFGFEESLEVDTNPLLGA |
| | | GKFATDPAVTLAHELIHAGHRLYGIAINPNRVFKVNTNAYYEMSGLEVSFEE |
| | | LRTFGGHDAKFIDSLQENEFRLYYYNRFRDIASTLNRAKSIVGTTASLQYMK |
| | | NVFKEKYLLSEDTSGKFSVDKLKFDKLYKMLTEIYTEDNFVKFFKVLNRKTYL |
| | | NFDKAVFKINIVPRVNYTIYDGFNLRNTNLAANFNGQNTEINNMNFTKLKN |
| | | FTGLFEFYKLLCVRGIITSKTKS |
| 109 | LC BoNT/A1-Group 3 | MPFVNKQFNYKDPVNGVDIAYIKIPNAGQMQPVKAFKIHNKIWVIPERDT |
| | (K212R, K272R, | FTNPEEGDLNPPPEAKQVPVSYYDSTYLSTDNEKDNYLKGVTKLFERIYSTDL |
| | K356R) | GRMLLTSIVRGIPFWGGSTIDTELKVIDTNCINVIQPDGSYRSEELNLVIIGPS |
| | | ADIIQFECKSFGHEVLNLTRNGYGSTQYIRFSPDFTFGFEESLEVDTNPLLGA |
| | | GRFATDPAVTLAHELIHAGHRLYGIAINPNRVFKVNTNAYYEMSGLEVSFEE |
| | | LRTFGGHDARFIDSLQENEFRLYYYNKFKDIASTLNKAKSIVGTTASLQYMK |
| | | NVFKEKYLLSEDTSGKFSVDKLKFDKLYKMLTEIYTEDNFVRFFKVLNRKTYL |
| | | NFDKAVFKINIVPKVNYTIYDGFNLRNTNLAANFNGQNTEINNMNFTKLKN |
| | | FTGLFEFYKLLCVRGIITSKTKS |
| 110 | LC BoNT/A1-KR9 | MPFVNKQFNYRDPVNGVDIAYIKIPNAGQMQPVKAFKIHNRIWVIPERDT |
| | (K11R, K41R, K318R, | FTNPEEGDLNPPPEAKQVPVSYYDSTYLSTDNEKDNYLKGVTKLFERIYSTDL |
| | K335R, K337R, K340R, | GRMLLTSIVRGIPFWGGSTIDTELKVIDTNCINVIQPDGSYRSEELNLVIIGPS |
| | K343R, K375R, K415R) | ADIIQFECKSFGHEVLNLTRNGYGSTQYIRFSPDFTFGFEESLEVDTNPLLGA |
| | | GKFATDPAVTLAHELIHAGHRLYGIAINPNRVFKVNTNAYYEMSGLEVSFEE |
| | | LRTFGGHDAKFIDSLQENEFRLYYYNKFKDIASTLNKAKSIVGTTASLQYMK |
| | | NVFREKYLLSEDTSGKFSVDRLRFDRLYRMLTEIYTEDNFVKFFKVLNRKTYL |
| | | NFDKAVFRINIVPKVNYTIYDGFNLRNTNLAANFNGQNTEINNMNFTRLKN |
| | | FTGLFEFYKLLCVRGIITSKTKS |
| 111 | LC BoNT/A1-KR10 | MPFVNKQFNYRDPVNGVDIAYIKIPNAGQMQPVKAFKIHNKIWVIPERDT |
| | (K11R, K289R, K291R, | FTNPEEGDLNPPPEAKQVPVSYYDSTYLSTDNEKDNYLKGVTKLFERIYSTDL |
| | K299R, K335R, K337R, | GRMLLTSIVRGIPFWGGSTIDTELKVIDTNCINVIQPDGSYRSEELNLVIIGPS |
| | K343R, K375R, K381R, | ADIIQFECKSFGHEVLNLTRNGYGSTQYIRFSPDFTFGFEESLEVDTNPLLGA |
| | K415R) | GKFATDPAVTLAHELIHAGHRLYGIAINPNRVFKVNTNAYYEMSGLEVSFEE |
| | | LRTFGGHDAKFIDSLQENEFRLYYYNRFRDIASTLNRAKSIVGTTASLQYMK |
| | | NVFKEKYLLSEDTSGKFSVDRLRFDKLYRMLTEIYTEDNFVKFFKVLNRKTYL |
| | | NFDKAVFRINIVPRVNYTIYDGFNLRNTNLAANFNGQNTEINNMNFTRLK |
| | | NFTGLFEFYKLLCVRGIITSKTKS |
| 112 | LC BoNT/A1-KR11-41 | MPFVNKQFNYRDPVNGVDIAYIKIPNAGQMQPVKAFKIHNRIWVIPERDT |
| | (K11R, K41R, K289R, | FTNPEEGDLNPPPEAKQVPVSYYDSTYLSTDNEKDNYLKGVTKLFERIYSTDL |
| | K291R, K299R, K335R, | GRMLLTSIVRGIPFWGGSTIDTELKVIDTNCINVIQPDGSYRSEELNLVIIGPS |
| | K337R, K343R, K375R, | ADIIQFECKSFGHEVLNLTRNGYGSTQYIRFSPDFTFGFEESLEVDTNPLLGA |
| | K381R, K415R) | GKFATDPAVTLAHELIHAGHRLYGIAINPNRVFKVNTNAYYEMSGLEVSFEE |
| | | LRTFGGHDAKFIDSLQENEFRLYYYNRFRDIASTLNRAKSIVGTTASLQYMK |
| | | NVFKEKYLLSEDTSGKFSVDRLRFDKLYRMLTEIYTEDNFVKFFKVLNRKTYL |
| | | NFDKAVFRINIVPRVNYTIYDGFNLRNTNLAANFNGQNTEINNMNFTRLK |
| | | NFTGLFEFYKLLCVRGIITSKTKS |
| 113 | LC BoNT/A1-KR11-212 | MPFVNKQFNYRDPVNGVDIAYIKIPNAGQMQPVKAFKIHNKIWVIPERDT |
| | (K11R, K212R, K289R, | FTNPEEGDLNPPPEAKQVPVSYYDSTYLSTDNEKDNYLKGVTKLFERIYSTDL |
| | K291R, K299R, K335R, | GRMLLTSIVRGIPFWGGSTIDTELKVIDTNCINVIQPDGSYRSEELNLVIIGPS |
| | K337R, K343R, K375R, | ADIIQFECKSFGHEVLNLTRNGYGSTQYIRFSPDFTFGFEESLEVDTNPLLGA |
| | K381R, K415R) | GRFATDPAVTLAHELIHAGHRLYGIAINPNRVFKVNTNAYYEMSGLEVSFEE |
| | | LRTFGGHDAKFIDSLQENEFRLYYYNRFRDIASTLNRAKSIVGTTASLQYMK |
| | | NVFKEKYLLSEDTSGKFSVDRLRFDKLYRMLTEIYTEDNFVKFFKVLNRKTYL |
| | | NFDKAVFRINIVPRVNYTIYDGFNLRNTNLAANFNGQNTEINNMNFTRLK |
| | | NFTGLFEFYKLLCVRGIITSKTKS |
| 114 | LC BoNT/A1-KR11-272 | MPFVNKQFNYRDPVNGVDIAYIKIPNAGQMQPVKAFKIHNKIWVIPERDT |
| | (K11R, K272R, K289R, | FTNPEEGDLNPPPEAKQVPVSYYDSTYLSTDNEKDNYLKGVTKLFERIYSTDL |
| | K291R, K299R, K335R, | GRMLLTSIVRGIPFWGGSTIDTELKVIDTNCINVIQPDGSYRSEELNLVIIGPS |
| | K337R, K343R, K375R, | ADIIQFECKSFGHEVLNLTRNGYGSTQYIRFSPDFTFGFEESLEVDTNPLLGA |
| | K381R, K415R) | GKFATDPAVTLAHELIHAGHRLYGIAINPNRVFKVNTNAYYEMSGLEVSFEE |
| | | LRTFGGHDARFIDSLQENEFRLYYYNRFRDIASTLNRAKSIVGTTASLQYMK |
| | | NVFKEKYLLSEDTSGKFSVDRLRFDKLYRMLTEIYTEDNFVKFFKVLNRKTYL |
| | | NFDKAVFRINIVPRVNYTIYDGFNLRNTNLAANFNGQNTEINNMNFTRLK |
| | | NFTGLFEFYKLLCVRGIITSKTKS |
| 115 | LC BoNT/A1-KR11-318 | MPFVNKQFNYRDPVNGVDIAYIKIPNAGQMQPVKAFKIHNKIWVIPERDT |
| | (K11R, K289R, K291R, | FTNPEEGDLNPPPEAKQVPVSYYDSTYLSTDNEKDNYLKGVTKLFERIYSTDL |
| | K299R, K318R, K335R, | GRMLLTSIVRGIPFWGGSTIDTELKVIDTNCINVIQPDGSYRSEELNLVIIGPS |
| | K337R, K343R, K375R, | ADIIQFECKSFGHEVLNLTRNGYGSTQYIRFSPDFTFGFEESLEVDTNPLLGA |
| | K381R, K415R) | GKFATDPAVTLAHELIHAGHRLYGIAINPNRVFKVNTNAYYEMSGLEVSFEE |
| | | LRTFGGHDAKFIDSLQENEFRLYYYNRFRDIASTLNRAKSIVGTTASLQYMK |
| | | NVFREKYLLSEDTSGKFSVDRLRFDKLYRMLTEIYTEDNFVKFFKVLNRKTYL |
| | | NFDKAVFRINIVPRVNYTIYDGFNLRNTNLAANFNGQNTEINNMNFTRLK |
| | | NFTGLFEFYKLLCVRGIITSKTKS |
| 116 | LC BoNT/A1-KR11-340 | MPFVNKQFNYRDPVNGVDIAYIKIPNAGQMQPVKAFKIHNKIWVIPERDT |
| | (K11R, K289R, K291R, | FTNPEEGDLNPPPEAKQVPVSYYDSTYLSTDNEKDNYLKGVTKLFERIYSTDL |
| | K299R, K335R, K337R, | GRMLLTSIVRGIPFWGGSTIDTELKVIDTNCINVIQPDGSYRSEELNLVIIGPS |
| | K340R, K343R, K375R, | ADIIQFECKSFGHEVLNLTRNGYGSTQYIRFSPDFTFGFEESLEVDTNPLLGA |
| | K381R, K415R) | GKFATDPAVTLAHELIHAGHRLYGIAINPNRVFKVNTNAYYEMSGLEVSFEE |
| | | LRTFGGHDAKFIDSLQENEFRLYYYNRFRDIASTLNRAKSIVGTTASLQYMK |
| | | NVFKEKYLLSEDTSGKFSVDRLRFDRLYRMLTEIYTEDNFVKFFKVLNRKTYL |
| | | NFDKAVFRINIVPRVNYTIYDGFNLRNTNLAANFNGQNTEINNMNFTRLK |
| | | NFTGLFEFYKLLCVRGIITSKTKS |
| 117 | LC BoNT/A1-KR11-356 | MPFVNKQFNYRDPVNGVDIAYIKIPNAGQMQPVKAFKIHNKIWVIPERDT |
| | (K11R, K289R, K291R, | FTNPEEGDLNPPPEAKQVPVSYYDSTYLSTDNEKDNYLKGVTKLFERIYSTDL |
| | K299R, K335R, K337R, | GRMLLTSIVRGIPFWGGSTIDTELKVIDTNCINVIQPDGSYRSEELNLVIIGPS |
| | K343R, K356R, K375R, | ADIIQFECKSFGHEVLNLTRNGYGSTQYIRFSPDFTFGFEESLEVDTNPLLGA |
| | K381R, K415R) | GKFATDPAVTLAHELIHAGHRLYGIAINPNRVFKVNTNAYYEMSGLEVSFEE |
| | | LRTFGGHDAKFIDSLQENEFRLYYYNRFRDIASTLNRAKSIVGTTASLQYMK |
| | | NVFKEKYLLSEDTSGKFSVDRLRFDKLYRMLTEIYTEDNFVRFFKVLNRKTYL |
| | | NFDKAVFRINIVPRVNYTIYDGFNLRNTNLAANFNGQNTEINNMNFTRLK |
| | | NFTGLFEFYKLLCVRGIITSKTKS |
| 118 | LC BoNT/A1-KR13 | MPFVNKQFNYRDPVNGVDIAYIKIPNAGQMQPVKAFKIHNRIWVIPERDT |
| | (K11R, K41R, K289R, | FTNPEEGDLNPPPEAKQVPVSYYDSTYLSTDNEKDNYLKGVTKLFERIYSTDL |
| | K291R, K299R, K318R, | GRMLLTSIVRGIPFWGGSTIDTELKVIDTNCINVIQPDGSYRSEELNLVIIGPS |
| | K335R, K337R, K340R, | ADIIQFECKSFGHEVLNLTRNGYGSTQYIRFSPDFTFGFEESLEVDTNPLLGA |
| | K343R, K375R, K381R, | GKFATDPAVTLAHELIHAGHRLYGIAINPNRVFKVNTNAYYEMSGLEVSFEE |
| | K415R) | LRTFGGHDAKFIDSLQENEFRLYYYNRFRDIASTLNRAKSIVGTTASLQYMK |
| | | NVFREKYLLSEDTSGKFSVDRLRFDRLYRMLTEIYTEDNFVKFFKVLNRKTYL |
| | | NFDKAVFRINIVPRVNYTIYDGFNLRNTNLAANFNGQNTEINNMNFTRLK |
| | | NFTGLFEFYKLLCVRGIITSKTKS |
| 119 | LC BoNT/A1-KR15 | MPFVNKQFNYRDPVNGVDIAYIKIPNAGQMQPVKAFKIHNRIWVIPERDT |
| | (K11R, K41R, K212R, | FTNPEEGDLNPPPEAKQVPVSYYDSTYLSTDNEKDNYLKGVTKLFERIYSTDL |
| | K289R, K291R, K299R, | GRMLLTSIVRGIPFWGGSTIDTELKVIDTNCINVIQPDGSYRSEELNLVIIGPS |
| | K318R, K335R, K337R, | ADIIQFECKSFGHEVLNLTRNGYGSTQYIRFSPDFTFGFEESLEVDTNPLLGA |
| | K340R, K343R, K356R, | GRFATDPAVTLAHELIHAGHRLYGIAINPNRVFKVNTNAYYEMSGLEVSFEE |
| | K375R, K381R, K415R) | LRTFGGHDAKFIDSLQENEFRLYYYNRFRDIASTLNRAKSIVGTTASLQYMK |
| | | NVFREKYLLSEDTSGKFSVDRLRFDRLYRMLTEIYTEDNFVRFFKVLNRKTYL |
| | | NFDKAVFRINIVPRVNYTIYDGFNLRNTNLAANFNGQNTEINNMNFTRLK |
| | | NFTGLFEFYKLLCVRGIITSKTKS |
| 120 | LC BoNT/A1-KR16 | MPFVNKQFNYRDPVNGVDIAYIKIPNAGQMQPVKAFKIHNRIWVIPERDT |
| | (K11R, K41R, K212R, | FTNPEEGDLNPPPEAKQVPVSYYDSTYLSTDNEKDNYLKGVTKLFERIYSTDL |
| | K272R, K289R, K291R, | GRMLLTSIVRGIPFWGGSTIDTELKVIDTNCINVIQPDGSYRSEELNLVIIGPS |
| | K299R, K318R, K335R, | ADIIQFECKSFGHEVLNLTRNGYGSTQYIRFSPDFTFGFEESLEVDTNPLLGA |
| | K337R, K340R, K343R, | GRFATDPAVTLAHELIHAGHRLYGIAINPNRVFKVNTNAYYEMSGLEVSFEE |
| | K356R, K375R, K381R, | LRTFGGHDARFIDSLQENEFRLYYYNRFRDIASTLNRAKSIVGTTASLQYMK |
| | K415R) | NVFREKYLLSEDTSGKFSVDRLRFDRLYRMLTEIYTEDNFVRFFKVLNRKTYL |
| | | NFDKAVFRINIVPRVNYTIYDGFNLRNTNLAANFNGQNTEINNMNFTRLK |
| | | NFTGLFEFYKLLCVRGIITSKTKS |
| 121 | LC BoNT/A2-WT | MPFVNKQFNYKDPVNGVDIAYIKIPNAGQMQPVKAFKIHNKIWVIPERDT |
| | | FTNPEEGDLNPPPEAKQVPVSYYDSTYLSTDNEKDNYLKGVTKLFERIYSTDL |
| | | GRMLLTSIVRGIPFWGGSTIDTELKVIDTNCINVIQPDGSYRSEELNLVIIGPS |
| | | ADIIQFECKSFGHDVLNLTRNGYGSTQYIRFSPDFTFGFEESLEVDTNPLLGA |
| | | GKFATDPAVTLAHELIHAEHRLYGIAINPNRVFKVNTNAYYEMSGLEVSFEE |
| | | LRTFGGHDAKFIDSLQENEFRLYYYNKFKDVASTLNKAKSIIGTTASLQYMK |
| | | NVFKEKYLLSEDTSGKFSVDKLKFDKLYKMLTEIYTEDNFVNFFKVINRKTYL |
| | | NFDKAVFRINIVPDENYTIKDGFNLKGANLSTNFNGQNTEINSRNFTRLKNF |
| | | TGLFEFYKLLCVRGIIPFKTKS |
| 122 | LC BoNT/A2-K11R | MPFVNKQFNYRDPVNGVDIAYIKIPNAGQMQPVKAFKIHNKIWVIPERDT |
| | | FTNPEEGDLNPPPEAKQVPVSYYDSTYLSTDNEKDNYLKGVTKLFERIYSTDL |
| | | GRMLLTSIVRGIPFWGGSTIDTELKVIDTNCINVIQPDGSYRSEELNLVIIGPS |
| | | ADIIQFECKSFGHDVLNLTRNGYGSTQYIRFSPDFTFGFEESLEVDTNPLLGA |
| | | GKFATDPAVTLAHELIHAEHRLYGIAINPNRVFKVNTNAYYEMSGLEVSFEE |
| | | LRTFGGHDAKFIDSLQENEFRLYYYNKFKDVASTLNKAKSIIGTTASLQYMK |
| | | NVFKEKYLLSEDTSGKFSVDKLKFDKLYKMLTEIYTEDNFVNFFKVINRKTYL |
| | | NFDKAVFRINIVPDENYTIKDGFNLKGANLSTNFNGQNTEINSRNFTRLKNF |
| | | TGLFEFYKLLCVRGIIPFKTKS |
| 123 | LC BoNT/A2-K289R | MPFVNKQFNYKDPVNGVDIAYIKIPNAGQMQPVKAFKIHNKIWVIPERDT |
| | | FTNPEEGDLNPPPEAKQVPVSYYDSTYLSTDNEKDNYLKGVTKLFERIYSTDL |
| | | GRMLLTSIVRGIPFWGGSTIDTELKVIDTNCINVIQPDGSYRSEELNLVIIGPS |
| | | ADIIQFECKSFGHDVLNLTRNGYGSTQYIRFSPDFTFGFEESLEVDTNPLLGA |
| | | GKFATDPAVTLAHELIHAEHRLYGIAINPNRVFKVNTNAYYEMSGLEVSFEE |
| | | LRTFGGHDAKFIDSLQENEFRLYYYNRFKDVASTLNKAKSIIGTTASLQYMK |
| | | NVFKEKYLLSEDTSGKFSVDKLKFDKLYKMLTEIYTEDNFVNFFKVINRKTYL |
| | | NFDKAVFRINIVPDENYTIKDGFNLKGANLSTNFNGQNTEINSRNFTRLKNF |
| | | TGLFEFYKLLCVRGIIPFKTKS |
| 124 | LC BoNT/A2-K291R | MPFVNKQFNYKDPVNGVDIAYIKIPNAGQMQPVKAFKIHNKIWVIPERDT |
| | | FTNPEEGDLNPPPEAKQVPVSYYDSTYLSTDNEKDNYLKGVTKLFERIYSTDL |
| | | GRMLLTSIVRGIPFWGGSTIDTELKVIDTNCINVIQPDGSYRSEELNLVIIGPS |
| | | ADIIQFECKSFGHDVLNLTRNGYGSTQYIRFSPDFTFGFEESLEVDTNPLLGA |
| | | GKFATDPAVTLAHELIHAEHRLYGIAINPNRVFKVNTNAYYEMSGLEVSFEE |
| | | LRTFGGHDAKFIDSLQENEFRLYYYNKFRDVASTLNKAKSIIGTTASLQYMK |
| | | NVFKEKYLLSEDTSGKFSVDKLKFDKLYKMLTEIYTEDNFVNFFKVINRKTYL |
| | | NFDKAVFRINIVPDENYTIKDGFNLKGANLSTNFNGQNTEINSRNFTRLKNF |
| | | TGLFEFYKLLCVRGIIPFKTKS |
| 125 | LC BoNT/A2-K299R | MPFVNKQFNYKDPVNGVDIAYIKIPNAGQMQPVKAFKIHNKIWVIPERDT |
| | | FTNPEEGDLNPPPEAKQVPVSYYDSTYLSTDNEKDNYLKGVTKLFERIYSTDL |
| | | GRMLLTSIVRGIPFWGGSTIDTELKVIDTNCINVIQPDGSYRSEELNLVIIGPS |
| | | ADIIQFECKSFGHDVLNLTRNGYGSTQYIRFSPDFTFGFEESLEVDTNPLLGA |
| | | GKFATDPAVTLAHELIHAEHRLYGIAINPNRVFKVNTNAYYEMSGLEVSFEE |
| | | LRTFGGHDAKFIDSLQENEFRLYYYNKFKDVASTLNRAKSIIGTTASLQYMK |
| | | NVFKEKYLLSEDTSGKFSVDKLKFDKLYKMLTEIYTEDNFVNFFKVINRKTYL |
| | | NFDKAVFRINIVPDENYTIKDGFNLKGANLSTNFNGQNTEINSRNFTRLKNF |
| | | TGLFEFYKLLCVRGIIPFKTKS |
| 126 | LC BoNT/A2-K335R | MPFVNKQFNYKDPVNGVDIAYIKIPNAGQMQPVKAFKIHNKIWVIPERDT |
| | | FTNPEEGDLNPPPEAKQVPVSYYDSTYLSTDNEKDNYLKGVTKLFERIYSTDL |
| | | GRMLLTSIVRGIPFWGGSTIDTELKVIDTNCINVIQPDGSYRSEELNLVIIGPS |
| | | ADIIQFECKSFGHDVLNLTRNGYGSTQYIRFSPDFTFGFEESLEVDTNPLLGA |
| | | GKFATDPAVTLAHELIHAEHRLYGIAINPNRVFKVNTNAYYEMSGLEVSFEE |
| | | LRTFGGHDAKFIDSLQENEFRLYYYNKFKDVASTLNKAKSIIGTTASLQYMK |
| | | NVFKEKYLLSEDTSGKFSVDRLKFDKLYKMLTEIYTEDNFVNFFKVINRKTYL |
| | | NFDKAVFRINIVPDENYTIKDGFNLKGANLSTNFNGQNTEINSRNFTRLKNF |
| | | TGLFEFYKLLCVRGIIPFKTKS |
| 127 | LC BoNT/A2-K337R | MPFVNKQFNYKDPVNGVDIAYIKIPNAGQMQPVKAFKIHNKIWVIPERDT |
| | | FTNPEEGDLNPPPEAKQVPVSYYDSTYLSTDNEKDNYLKGVTKLFERIYSTDL |
| | | GRMLLTSIVRGIPFWGGSTIDTELKVIDTNCINVIQPDGSYRSEELNLVIIGPS |
| | | ADIIQFECKSFGHDVLNLTRNGYGSTQYIRFSPDFTFGFEESLEVDTNPLLGA |
| | | GKFATDPAVTLAHELIHAEHRLYGIAINPNRVFKVNTNAYYEMSGLEVSFEE |
| | | LRTFGGHDAKFIDSLQENEFRLYYYNKFKDVASTLNKAKSIIGTTASLQYMK |
| | | NVFKEKYLLSEDTSGKFSVDKLRFDKLYKMLTEIYTEDNFVNFFKVINRKTYL |
| | | NFDKAVFRINIVPDENYTIKDGFNLKGANLSTNFNGQNTEINSRNFTRLKNF |
| | | TGLFEFYKLLCVRGIIPFKTKS |
| 128 | LC BoNT/A2-K343R | MPFVNKQFNYKDPVNGVDIAYIKIPNAGQMQPVKAFKIHNKIWVIPERDT |
| | | FTNPEEGDLNPPPEAKQVPVSYYDSTYLSTDNEKDNYLKGVTKLFERIYSTDL |
| | | GRMLLTSIVRGIPFWGGSTIDTELKVIDTNCINVIQPDGSYRSEELNLVIIGPS |
| | | ADIIQFECKSFGHDVLNLTRNGYGSTQYIRFSPDFTFGFEESLEVDTNPLLGA |
| | | GKFATDPAVTLAHELIHAEHRLYGIAINPNRVFKVNTNAYYEMSGLEVSFEE |
| | | LRTFGGHDAKFIDSLQENEFRLYYYNKFKDVASTLNKAKSIIGTTASLQYMK |
| | | NVFKEKYLLSEDTSGKFSVDKLKFDKLYRMLTEIYTEDNFVNFFKVINRKTYL |
| | | NFDKAVFRINIVPDENYTIKDGFNLKGANLSTNFNGQNTEINSRNFTRLKNF |
| | | TGLFEFYKLLCVRGIIPFKTKS |
| 129 | LC BoNT/A2-KR7 | MPFVNKQFNYRDPVNGVDIAYIKIPNAGQMQPVKAFKIHNKIWVIPERDT |
| | (K11R, K289R, K291R, | FTNPEEGDLNPPPEAKQVPVSYYDSTYLSTDNEKDNYLKGVTKLFERIYSTDL |
| | K299R, K335R, K337R, | GRMLLTSIVRGIPFWGGSTIDTELKVIDTNCINVIQPDGSYRSEELNLVIIGPS |
| | K343R) | ADIIQFECKSFGHDVLNLTRNGYGSTQYIRFSPDFTFGFEESLEVDTNPLLGA |
| | | GKFATDPAVTLAHELIHAEHRLYGIAINPNRVFKVNTNAYYEMSGLEVSFEE |
| | | LRTFGGHDAKFIDSLQENEFRLYYYNRFRDVASTLNRAKSIIGTTASLQYMK |
| | | NVFKEKYLLSEDTSGKFSVDRLRFDKLYRMLTEIYTEDNFVNFFKVINRKTYL |
| | | NFDKAVFRINIVPDENYTIKDGFNLKGANLSTNFNGQNTEINSRNFTRLKNF |
| | | TGLFEFYKLLCVRGIIPFKTKS |
| 131 | H_{C}-BoNT/A1-F917R (of | IINTSILNLRYESNHLIDLSRYASKINIGSKVNFDPIDKNQIQLRNLESSKIEVILK |
| | full length) | NAIVYNSMYENFSTSFWIRIPKYFNSISLNNEYTIINCMENNSGWKVSLNYG |
| | | EIIWTLQDTQEIKQRVVFKYSQMINISDYINRWIFVTITNNRLNNSKIYINGR |
| | | LIDQKPISNLGNIHASNNIMFKLDGCRDTHRYIWIKYFNLFDKELNEKEIKDL |
| | | YDNQSNSGILKDFWGDYLQYDKPYYMLNLYDPNKYVDVNNVGIRGYMYL |
| | | KGPRGSVMTTNIYLNSSLYRGTKFIIKKYASGNKDNIVRNNDRVYINVVVKN |
| | | KEYRLATNASQAGVEKILSALEIPDVGNLSQVVVMKSKNDQGITNKCKMNL |
| | | QDNNGNDIGFIGFHQFNNIAKLVASNWYNRQIERSSRTLGCSWEFIPVDD |
| | | GWGERPL |
| 132 | H_{C}-BoNT/A1-F917K (of | IINTSILNLRYESNHLIDLSRYASKINIGSKVNFDPIDKNQIQLKNLESSKIEVILK |
| | full length) | NAIVYNSMYENFSTSFWIRIPKYFNSISLNNEYTIINCMENNSGWKVSLNYG |
| | | EIIWTLQDTQEIKQRVVFKYSQMINISDYINRWIFVTITNNRLNNSKIYINGR |
| | | LIDQKPISNLGNIHASNNIMFKLDGCRDTHRYIWIKYFNLFDKELNEKEIKDL |
| | | YDNQSNSGILKDFWGDYLQYDKPYYMLNLYDPNKYVDVNNVGIRGYMYL |
| | | KGPRGSVMTTNIYLNSSLYRGTKFIIKKYASGNKDNIVRNNDRVYINVVVKN |
| | | KEYRLATNASQAGVEKILSALEIPDVGNLSQVVVMKSKNDQGITNKCKMNL |
| | | QDNNGNDIGFIGFHQFNNIAKLVASNWYNRQIERSSRTLGCSWEFIPVDD |
| | | GWGERPL |
| 133 | H_{C}-BoNT/A1-F953H | IINTSILNLRYESNHLIDLSRYASKINIGSKVNFDPIDKNQIQLFNLESSKIEVILK |
| | (of full length) | NAIVYNSMYENFSTSFWIRIPKYHNSISLNNEYTIINCMENNSGWKVSLNYG |
| | | EIIWTLQDTQEIKQRVVFKYSQMINISDYINRWIFVTITNNRLNNSKIYINGR |
| | | LIDQKPISNLGNIHASNNIMFKLDGCRDTHRYIWIKYFNLFDKELNEKEIKDL |
| | | YDNQSNSGILKDFWGDYLQYDKPYYMLNLYDPNKYVDVNNVGIRGYMYL |
| | | KGPRGSVMTTNIYLNSSLYRGTKFIIKKYASGNKDNIVRNNDRVYINVVVKN |
| | | KEYRLATNASQAGVEKILSALEIPDVGNLSQVVVMKSKNDQGITNKCKMNL |
| | | QDNNGNDIGFIGFHQFNNIAKLVASNWYNRQIERSSRTLGCSWEFIPVDD |
| | | GWGERPL |
| 134 | H_{C}-BoNT/A1-F953Y (of | IINTSILNLRYESNHLIDLSRYASKINIGSKVNFDPIDKNQIQLFNLESSKIEVILK |
| | full length) | NAIVYNSMYENFSTSFWIRIPKYYNSISLNNEYTIINCMENNSGWKVSLNYG |
| | | EIIWTLQDTQEIKQRVVFKYSQMINISDYINRWIFVTITNNRLNNSKIYINGR |
| | | LIDQKPISNLGNIHASNNIMFKLDGCRDTHRYIWIKYFNLFDKELNEKEIKDL |
| | | YDNQSNSGILKDFWGDYLQYDKPYYMLNLYDPNKYVDVNNVGIRGYMYL |
| | | KGPRGSVMTTNIYLNSSLYRGTKFIIKKYASGNKDNIVRNNDRVYINVVVKN |
| | | KEYRLATNASQAGVEKILSALEIPDVGNLSQVVVMKSKNDQGITNKCKMNL |
| | | QDNNGNDIGFIGFHQFNNIAKLVASNWYNRQIERSSRTLGCSWEFIPVDD |
| | | GWGERPL |
| 135 | H_{C}-BoNT/A1-N954S | IINTSILNLRYESNHLIDLSRYASKINIGSKVNFDPIDKNQIQLFNLESSKIEVILK |
| | (of full length) | NAIVYNSMYENFSTSFWIRIPKYFSSISLNNEYTIINCMENNSGWKVSLNYG |
| | | EIIWTLQDTQEIKQRVVFKYSQMINISDYINRWIFVTITNNRLNNSKIYINGR |
| | | LIDQKPISNLGNIHASNNIMFKLDGCRDTHRYIWIKYFNLFDKELNEKEIKDL |
| | | YDNQSNSGILKDFWGDYLQYDKPYYMLNLYDPNKYVDVNNVGIRGYMYL |
| | | KGPRGSVMTTNIYLNSSLYRGTKFIIKKYASGNKDNIVRNNDRVYINVVVKN |
| | | KEYRLATNASQAGVEKILSALEIPDVGNLSQVVVMKSKNDQGITNKCKMNL |
| | | QDNNGNDIGFIGFHQFNNIAKLVASNWYNRQIERSSRTLGCSWEFIPVDD |
| | | GWGERPL |
| 136 | H_{C}-BoNT/A1-S955K (of | IINTSILNLRYESNHLIDLSRYASKINIGSKVNFDPIDKNQIQLFNLESSKIEVILK |
| | full length) | NAIVYNSMYENFSTSFWIRIPKYFNKISLNNEYTIINCMENNSGWKVSLNYG |
| | | EIIWTLQDTQEIKQRVVFKYSQMINISDYINRWIFVTITNNRLNNSKIYINGR |
| | | LIDQKPISNLGNIHASNNIMFKLDGCRDTHRYIWIKYFNLFDKELNEKEIKDL |
| | | YDNQSNSGILKDFWGDYLQYDKPYYMLNLYDPNKYVDVNNVGIRGYMYL |
| | | KGPRGSVMTTNIYLNSSLYRGTKFIIKKYASGNKDNIVRNNDRVYINVVVKN |
| | | KEYRLATNASQAGVEKILSALEIPDVGNLSQVVVMKSKNDQGITNKCKMNL |
| | | QDNNGNDIGFIGFHQFNNIAKLVASNWYNRQIERSSRTLGCSWEFIPVDD |
| | | GWGERPL |
| 137 | H_{C}-BoNT/A1-S957N | IINTSILNLRYESNHLIDLSRYASKINIGSKVNFDPIDKNQIQLFNLESSKIEVILK |
| | (of full length) | NAIVYNSMYENFSTSFWIRIPKYFNSINLNNEYTIINCMENNSGWKVSLNYG |
| | | EIIWTLQDTQEIKQRVVFKYSQMINISDYINRWIFVTITNNRLNNSKIYINGR |
| | | LIDQKPISNLGNIHASNNIMFKLDGCRDTHRYIWIKYFNLFDKELNEKEIKDL |
| | | YDNQSNSGILKDFWGDYLQYDKPYYMLNLYDPNKYVDVNNVGIRGYMYL |
| | | KGPRGSVMTTNIYLNSSLYRGTKFIIKKYASGNKDNIVRNNDRVYINVVVKN |
| | | KEYRLATNASQAGVEKILSALEIPDVGNLSQVVVMKSKNDQGITNKCKMNL |
| | | QDNNGNDIGFIGFHQFNNIAKLVASNWYNRQIERSSRTLGCSWEFIPVDD |
| | | GWGERPL |
| 138 | H_{C}-BoNT/A1-M968I | IINTSILNLRYESNHLIDLSRYASKINIGSKVNFDPIDKNQIQLFNLESSKIEVILK |
| | (of full length) | NAIVYNSMYENFSTSFWIRIPKYFNSISLNNEYTIINCIENNSGWKVSLNYGEI |
| | | IWTLQDTQEIKQRVVFKYSQMINISDYINRWIFVTITNNRLNNSKIYINGRLI |
| | | DQKPISNLGNIHASNNIMFKLDGCRDTHRYIWIKYFNLFDKELNEKEIKDLY |
| | | DNQSNSGILKDFWGDYLQYDKPYYMLNLYDPNKYVDVNNVGIRGYMYLK |
| | | GPRGSVMTTNIYLNSSLYRGTKFIIKKYASGNKDNIVRNNDRVYINVVVKNK |
| | | EYRLATNASQAGVEKILSALEIPDVGNLSQVVVMKSKNDQGITNKCKMNL |
| | | QDNNGNDIGFIGFHQFNNIAKLVASNWYNRQIERSSRTLGCSWEFIPVDD |
| | | GWGERPL |
| 139 | H_{C}-BoNT/A1-N1025T | IINTSILNLRYESNHLIDLSRYASKINIGSKVNFDPIDKNQIQLFNLESSKIEVILK |
| | (of full length) | NAIVYNSMYENFSTSFWIRIPKYFNSISLNNEYTIINCMENNSGWKVSLNYG |
| | | EIIWTLQDTQEIKQRVVFKYSQMINISDYINRWIFVTITNNRLTNSKIYINGRL |
| | | IDQKPISNLGNIHASNNIMFKLDGCRDTHRYIWIKYFNLFDKELNEKEIKDLY |
| | | DNQSNSGILKDFWGDYLQYDKPYYMLNLYDPNKYVDVNNVGIRGYMYLK |
| | | GPRGSVMTTNIYLNSSLYRGTKFIIKKYASGNKDNIVRNNDRVYINVVVKNK |
| | | EYRLATNASQAGVEKILSALEIPDVGNLSQVVVMKSKNDQGITNKCKMNL |
| | | QDNNGNDIGFIGFHQFNNIAKLVASNWYNRQIERSSRTLGCSWEFIPVDD |
| | | GWGERPL |
| 140 | H_{C}-BoNT/A1 - N1026K | IINTSILNLRYESNHLIDLSRYASKINIGSKVNFDPIDKNQIQLFNLESSKIEVILK |
| | (of full length) | NAIVYNSMYENFSTSFWIRIPKYFNSISLNNEYTIINCMENNSGWKVSLNYG |
| | | EIIWTLQDTQEIKQRVVFKYSQMINISDYINRWIFVTITNNRLNKSKIYINGRL |
| | | IDQKPISNLGNIHASNNIMFKLDGCRDTHRYIWIKYFNLFDKELNEKEIKDLY |
| | | DNQSNSGILKDFWGDYLQYDKPYYMLNLYDPNKYVDVNNVGIRGYMYLK |
| | | GPRGSVMTTNIYLNSSLYRGTKFIIKKYASGNKDNIVRNNDRVYINVVVKNK |
| | | EYRLATNASQAGVEKILSALEIPDVGNLSQVVVMKSKNDQGITNKCKMNL |
| | | QDNNGNDIGFIGFHQFNNIAKLVASNWYNRQIERSSRTLGCSWEFIPVDD |
| | | GWGERPL |
| 141 | H_{C}-BoNT/A1 - N1052K | IINTSILNLRYESNHLIDLSRYASKINIGSKVNFDPIDKNQIQLFNLESSKIEVILK |
| | (of full length) | NAIVYNSMYENFSTSFWIRIPKYFNSISLNNEYTIINCMENNSGWKVSLNYG |
| | | EIIWTLQDTQEIKQRVVFKYSQMINISDYINRWIFVTITNNRLNNSKIYINGR |
| | | LIDQKPISNLGNIHASNKIMFKLDGCRDTHRYIWIKYFNLFDKELNEKEIKDL |
| | | YDNQSNSGILKDFWGDYLQYDKPYYMLNLYDPNKYVDVNNVGIRGYMYL |
| | | KGPRGSVMTTNIYLNSSLYRGTKFIIKKYASGNKDNIVRNNDRVYINVVVKN |
| | | KEYRLATNASQAGVEKILSALEIPDVGNLSQVVVMKSKNDQGITNKCKMNL |
| | | QDNNGNDIGFIGFHQFNNIAKLVASNWYNRQIERSSRTLGCSWEFIPVDD |
| | | GWGERPL |
| 142 | H_{C}-BoNT/A1 - D1062E | IINTSILNLRYESNHLIDLSRYASKINIGSKVNFDPIDKNQIQLFNLESSKIEVILK |
| | (of full length) | NAIVYNSMYENFSTSFWIRIPKYFNSISLNNEYTIINCMENNSGWKVSLNYG |
| | | EIIWTLQDTQEIKQRVVFKYSQMINISDYINRWIFVTITNNRLNNSKIYINGR |
| | | LIDQKPISNLGNIHASNNIMFKLDGCRETHRYIWIKYFNLFDKELNEKEIKDLY |
| | | DNQSNSGILKDFWGDYLQYDKPYYMLNLYDPNKYVDVNNVGIRGYMYLK |
| | | GPRGSVMTTNIYLNSSLYRGTKFIIKKYASGNKDNIVRNNDRVYINVVVKNK |
| | | EYRLATNASQAGVEKILSALEIPDVGNLSQVVVMKSKNDQGITNKCKMNL |
| | | QDNNGNDIGFIGFHQFNNIAKLVASNWYNRQIERSSRTLGCSWEFIPVDD |
| | | GWGERPL |
| 143 | H_{C}-BoNT/A1 - T1063P | IINTSILNLRYESNHLIDLSRYASKINIGSKVNFDPIDKNQIQLFNLESSKIEVILK |
| | (of full length) | NAIVYNSMYENFSTSFWIRIPKYFNSISLNNEYTIINCMENNSGWKVSLNYG |
| | | EIIWTLQDTQEIKQRVVFKYSQMINISDYINRWIFVTITNNRLNNSKIYINGR |
| | | LIDQKPISNLGNIHASNNIMFKLDGCRDPHRYIWIKYFNLFDKELNEKEIKDL |
| | | YDNQSNSGILKDFWGDYLQYDKPYYMLNLYDPNKYVDVNNVGIRGYMYL |
| | | KGPRGSVMTTNIYLNSSLYRGTKFIIKKYASGNKDNIVRNNDRVYINVVVKN |
| | | KEYRLATNASQAGVEKILSALEIPDVGNLSQVVVMKSKNDQGITNKCKMNL |
| | | QDNNGNDIGFIGFHQFNNIAKLVASNWYNRQIERSSRTLGCSWEFIPVDD |
| | | GWGERPL |
| 144 | H_{C}-BoNT/A1 - H1064R | IINTSILNLRYESNHLIDLSRYASKINIGSKVNFDPIDKNQIQLFNLESSKIEVILK |
| | (of full length) | NAIVYNSMYENFSTSFWIRIPKYFNSISLNNEYTIINCMENNSGWKVSLNYG |
| | | EIIWTLQDTQEIKQRVVFKYSQMINISDYINRWIFVTITNNRLNNSKIYINGR |
| | | LIDQKPISNLGNIHASNNIMFKLDGCRDTRRYIWIKYFNLFDKELNEKEIKDL |
| | | YDNQSNSGILKDFWGDYLQYDKPYYMLNLYDPNKYVDVNNVGIRGYMYL |
| | | KGPRGSVMTTNIYLNSSLYRGTKFIIKKYASGNKDNIVRNNDRVYINVVVKN |
| | | KEYRLATNASQAGVEKILSALEIPDVGNLSQVVVMKSKNDQGITNKCKMNL |
| | | QDNNGNDIGFIGFHQFNNIAKLVASNWYNRQIERSSRTLGCSWEFIPVDD |
| | | GWGERPL |
| 145 | H_{C}-BoNT/A1 - H1064Q | IINTSILNLRYESNHLIDLSRYASKINIGSKVNFDPIDKNQIQLFNLESSKIEVILK |
| | (of full length) | NAIVYNSMYENFSTSFWIRIPKYFNSISLNNEYTIINCMENNSGWKVSLNYG |
| | | EIIWTLQDTQEIKQRVVFKYSQMINISDYINRWIFVTITNNRLNNSKIYINGR |
| | | LIDQKPISNLGNIHASNNIMFKLDGCRDTQRYIWIKYFNLFDKELNEKEIKDL |
| | | YDNQSNSGILKDFWGDYLQYDKPYYMLNLYDPNKYVDVNNVGIRGYMYL |
| | | KGPRGSVMTTNIYLNSSLYRGTKFIIKKYASGNKDNIVRNNDRVYINVVVKN |
| | | KEYRLATNASQAGVEKILSALEIPDVGNLSQVVVMKSKNDQGITNKCKMNL |
| | | QDNNGNDIGFIGFHQFNNIAKLVASNWYNRQIERSSRTLGCSWEFIPVDD |
| | | GWGERPL |
| 146 | H_{C}-BoNT/A1 - R1065N | IINTSILNLRYESNHLIDLSRYASKINIGSKVNFDPIDKNQIQLFNLESSKIEVILK |
| | (of full length) | NAIVYNSMYENFSTSFWIRIPKYFNSISLNNEYTIINCMENNSGWKVSLNYG |
| | | EIIWTLQDTQEIKQRVVFKYSQMINISDYINRWIFVTITNNRLNNSKIYINGR |
| | | LIDQKPISNLGNIHASNNIMFKLDGCRDTHNYIWIKYFNLFDKELNEKEIKDL |
| | | YDNQSNSGILKDFWGDYLQYDKPYYMLNLYDPNKYVDVNNVGIRGYMYL |
| | | KGPRGSVMTTNIYLNSSLYRGTKFIIKKYASGNKDNIVRNNDRVYINVVVKN |
| | | KEYRLATNASQAGVEKILSALEIPDVGNLSQVVVMKSKNDQGITNKCKMNL |
| | | QDNNGNDIGFIGFHQFNNIAKLVASNWYNRQIERSSRTLGCSWEFIPVDD |
| | | GWGERPL |
| 147 | H_{C}-BoNT/A1 - Y1066R | IINTSILNLRYESNHLIDLSRYASKINIGSKVNFDPIDKNQIQLFNLESSKIEVILK |
| | (of full length) | NAIVYNSMYENFSTSFWIRIPKYFNSISLNNEYTIINCMENNSGWKVSLNYG |
| | | EIIWTLQDTQEIKQRVVFKYSQMINISDYINRWIFVTITNNRLNNSKIYINGR |
| | | LIDQKPISNLGNIHASNNIMFKLDGCRDTHRRIWIKYFNLFDKELNEKEIKDL |
| | | YDNQSNSGILKDFWGDYLQYDKPYYMLNLYDPNKYVDVNNVGIRGYMYL |
| | | KGPRGSVMTTNIYLNSSLYRGTKFIIKKYASGNKDNIVRNNDRVYINVVVKN |
| | | KEYRLATNASQAGVEKILSALEIPDVGNLSQVVVMKSKNDQGITNKCKMNL |
| | | QDNNGNDIGFIGFHQFNNIAKLVASNWYNRQIERSSRTLGCSWEFIPVDD |
| | | GWGERPL |
| 148 | H_{C}-BoNT/A1 - Y1066K | IINTSILNLRYESNHLIDLSRYASKINIGSKVNFDPIDKNQIQLFNLESSKIEVILK |
| | (of full length) | NAIVYNSMYENFSTSFWIRIPKYFNSISLNNEYTIINCMENNSGWKVSLNYG |
| | | EIIWTLQDTQEIKQRVVFKYSQMINISDYINRWIFVTITNNRLNNSKIYINGR |
| | | LIDQKPISNLGNIHASNNIMFKLDGCRDTHRKIWIKYFNLFDKELNEKEIKDL |
| | | YDNQSNSGILKDFWGDYLQYDKPYYMLNLYDPNKYVDVNNVGIRGYMYL |
| | | KGPRGSVMTTNIYLNSSLYRGTKFIIKKYASGNKDNIVRNNDRVYINVVVKN |
| | | KEYRLATNASQAGVEKILSALEIPDVGNLSQVVVMKSKNDQGITNKCKMNL |
| | | QDNNGNDIGFIGFHQFNNIAKLVASNWYNRQIERSSRTLGCSWEFIPVDD |
| | | GWGERPL |
| 149 | H_{C}-BoNT/A1 - T1145Y | IINTSILNLRYESNHLIDLSRYASKINIGSKVNFDPIDKNQIQLFNLESSKIEVILK |
| | (of full length) | NAIVYNSMYENFSTSFWIRIPKYFNSISLNNEYTIINCMENNSGWKVSLNYG |
| | | EIIWTLQDTQEIKQRVVFKYSQMINISDYINRWIFVTITNNRLNNSKIYINGR |
| | | LIDQKPISNLGNIHASNNIMFKLDGCRDTHRYIWIKYFNLFDKELNEKEIKDL |
| | | YDNQSNSGILKDFWGDYLQYDKPYYMLNLYDPNKYVDVNNVGIRGYMYL |
| | | KGPRGSVMYTNIYLNSSLYRGTKFIIKKYASGNKDNIVRNNDRVYINVVVKN |
| | | KEYRLATNASQAGVEKILSALEIPDVGNLSQVVVMKSKNDQGITNKCKMNL |
| | | QDNNGNDIGFIGFHQFNNIAKLVASNWYNRQIERSSRTLGCSWEFIPVDD |
| | | GWGERPL |
| 150 | H_{C}-BoNT/A1 - R1156M | IINTSILNLRYESNHLIDLSRYASKINIGSKVNFDPIDKNQIQLFNLESSKIEVILK |
| | (of full length) | NAIVYNSMYENFSTSFWIRIPKYFNSISLNNEYTIINCMENNSGWKVSLNYG |
| | | EIIWTLQDTQEIKQRVVFKYSQMINISDYINRWIFVTITNNRLNNSKIYINGR |
| | | LIDQKPISNLGNIHASNNIMFKLDGCRDTHRYIWIKYFNLFDKELNEKEIKDL |
| | | YDNQSNSGILKDFWGDYLQYDKPYYMLNLYDPNKYVDVNNVGIRGYMYL |
| | | KGPRGSVMTTNIYLNSSLYMGTKFIIKKYASGNKDNIVRNNDRVYINVVVK |
| | | NKEYRLATNASQAGVEKILSALEIPDVGNLSQVVVMKSKNDQGITNKCKM |
| | | NLQDNNGNDIGFIGFHQFNNIAKLVASNWYNRQIERSSRTLGCSWEFIPV |
| | | DDGWGERPL |
| 151 | H_{C}-BoNT/A1 - R1156I | IINTSILNLRYESNHLIDLSRYASKINIGSKVNFDPIDKNQIQLFNLESSKIEVILK |
| | (of full length) | NAIVYNSMYENFSTSFWIRIPKYFNSISLNNEYTIINCMENNSGWKVSLNYG |
| | | EIIWTLQDTQEIKQRVVFKYSQMINISDYINRWIFVTITNNRLNNSKIYINGR |
| | | LIDQKPISNLGNIHASNNIMFKLDGCRDTHRYIWIKYFNLFDKELNEKEIKDL |
| | | YDNQSNSGILKDFWGDYLQYDKPYYMLNLYDPNKYVDVNNVGIRGYMYL |
| | | KGPRGSVMTTNIYLNSSLYIGTKFIIKKYASGNKDNIVRNNDRVYINVVVKN |
| | | KEYRLATNASQAGVEKILSALEIPDVGNLSQVVVMKSKNDQGITNKCKMNL |
| | | QDNNGNDIGFIGFHQFNNIAKLVASNWYNRQIERSSRTLGCSWEFIPVDD |
| | | GWGERPL |
| 152 | H_{C}-BoNT/A1 - T1232R | IINTSILNLRYESNHLIDLSRYASKINIGSKVNFDPIDKNQIQLFNLESSKIEVILK |
| | (of full length) | NAIVYNSMYENFSTSFWIRIPKYFNSISLNNEYTIINCMENNSGWKVSLNYG |
| | | EIIWTLQDTQEIKQRVVFKYSQMINISDYINRWIFVTITNNRLNNSKIYINGR |
| | | LIDQKPISNLGNIHASNNIMFKLDGCRDTHRYIWIKYFNLFDKELNEKEIKDL |
| | | YDNQSNSGILKDFWGDYLQYDKPYYMLNLYDPNKYVDVNNVGIRGYMYL |
| | | KGPRGSVMTTNIYLNSSLYRGTKFIIKKYASGNKDNIVRNNDRVYINVVVKN |
| | | KEYRLATNASQAGVEKILSALEIPDVGNLSQVVVMKSKNDQGIRNKCKMN |
| | | LQDNNGNDIGFIGFHQFNNIAKLVASNWYNRQIERSSRTLGCSWEFIPVDD |
| | | GWGERPL |
| 153 | H_{C}-BoNT/A1 - T1232K | IINTSILNLRYESNHLIDLSRYASKINIGSKVNFDPIDKNQIQLFNLESSKIEVILK |
| | (of full length) | NAIVYNSMYENFSTSFWIRIPKYFNSISLNNEYTIINCMENNSGWKVSLNYG |
| | | EIIWTLQDTQEIKQRVVFKYSQMINISDYINRWIFVTITNNRLNNSKIYINGR |
| | | LIDQKPISNLGNIHASNNIMFKLDGCRDTHRYIWIKYFNLFDKELNEKEIKDL |
| | | YDNQSNSGILKDFWGDYLQYDKPYYMLNLYDPNKYVDVNNVGIRGYMYL |
| | | KGPRGSVMTTNIYLNSSLYRGTKFIIKKYASGNKDNIVRNNDRVYINVVVKN |
| | | KEYRLATNASQAGVEKILSALEIPDVGNLSQVVVMKSKNDQGIKNKCKMN |
| | | LQDNNGNDIGFIGFHQFNNIAKLVASNWYNRQIERSSRTLGCSWEFIPVDD |
| | | GWGERPL |
| 154 | H_{C}-BoNT/A1 - E1272G | IINTSILNLRYESNHLIDLSRYASKINIGSKVNFDPIDKNQIQLFNLESSKIEVILK |
| | (of full length) | NAIVYNSMYENFSTSFWIRIPKYFNSISLNNEYTIINCMENNSGWKVSLNYG |
| | | EIIWTLQDTQEIKQRVVFKYSQMINISDYINRWIFVTITNNRLNNSKIYINGR |
| | | LIDQKPISNLGNIHASNNIMFKLDGCRDTHRYIWIKYFNLFDKELNEKEIKDL |
| | | YDNQSNSGILKDFWGDYLQYDKPYYMLNLYDPNKYVDVNNVGIRGYMYL |
| | | KGPRGSVMTTNIYLNSSLYRGTKFIIKKYASGNKDNIVRNNDRVYINVVVKN |
| | | KEYRLATNASQAGVEKILSALEIPDVGNLSQVVVMKSKNDQGITNKCKMNL |
| | | QDNNGNDIGFIGFHQFNNIAKLVASNWYNRQIGRSSRTLGCSWEFIPVDD |
| | | GWGERPL |
| 155 | H_{C}-BoNT/A1-L1278F | IINTSILNLRYESNHLIDLSRYASKINIGSKVNFDPIDKNQIQLFNLESSKIEVILK |
| | (of full length) | NAIVYNSMYENFSTSFWIRIPKYFNSISLNNEYTIINCMENNSGWKVSLNYG |
| | | EIIWTLQDTQEIKQRVVFKYSQMINISDYINRWIFVTITNNRLNNSKIYINGR |
| | | LIDQKPISNLGNIHASNNIMFKLDGCRDTHRYIWIKYFNLFDKELNEKEIKDL |
| | | YDNQSNSGILKDFWGDYLQYDKPYYMLNLYDPNKYVDVNNVGIRGYMYL |
| | | KGPRGSVMTTNIYLNSSLYRGTKFIIKKYASGNKDNIVRNNDRVYINVVVKN |
| | | KEYRLATNASQAGVEKILSALEIPDVGNLSQVVVMKSKNDQGITNKCKMNL |
| | | QDNNGNDIGFIGFHQFNNIAKLVASNWYNRQIERSSRTFGCSWEFIPVDD |
| | | GWGERPL |
| 156 | H_{C}-BoNT/A1-L1278Y | IINTSILNLRYESNHLIDLSRYASKINIGSKVNFDPIDKNQIQLFNLESSKIEVILK |
| | (of full length) | NAIVYNSMYENFSTSFWIRIPKYFNSISLNNEYTIINCMENNSGWKVSLNYG |
| | | EIIWTLQDTQEIKQRVVFKYSQMINISDYINRWIFVTITNNRLNNSKIYINGR |
| | | LIDQKPISNLGNIHASNNIMFKLDGCRDTHRYIWIKYFNLFDKELNEKEIKDL |
| | | YDNQSNSGILKDFWGDYLQYDKPYYMLNLYDPNKYVDVNNVGIRGYMYL |
| | | KGPRGSVMTTNIYLNSSLYRGTKFIIKKYASGNKDNIVRNNDRVYINVVVKN |
| | | KEYRLATNASQAGVEKILSALEIPDVGNLSQVVVMKSKNDQGITNKCKMNL |
| | | QDNNGNDIGFIGFHQFNNIAKLVASNWYNRQIERSSRTYGCSWEFIPVDD |
| | | GWGERPL |
| 157 | H_{C}-BoNT/A1-L1278W | IINTSILNLRYESNHLIDLSRYASKINIGSKVNFDPIDKNQIQLFNLESSKIEVILK |
| | (of full length) | NAIVYNSMYENFSTSFWIRIPKYFNSISLNNEYTIINCMENNSGWKVSLNYG |
| | | EIIWTLQDTQEIKQRVVFKYSQMINISDYINRWIFVTITNNRLNNSKIYINGR |
| | | LIDQKPISNLGNIHASNNIMFKLDGCRDTHRYIWIKYFNLFDKELNEKEIKDL |
| | | YDNQSNSGILKDFWGDYLQYDKPYYMLNLYDPNKYVDVNNVGIRGYMYL |
| | | KGPRGSVMTTNIYLNSSLYRGTKFIIKKYASGNKDNIVRNNDRVYINVVVKN |
| | | KEYRLATNASQAGVEKILSALEIPDVGNLSQVVVMKSKNDQGITNKCKMNL |
| | | QDNNGNDIGFIGFHQFNNIAKLVASNWYNRQIERSSRTWGCSWEFIPVD |
| | | DGWGERPL |
| 158 | H_{C}-BoNT/A1-D1288E | IINTSILNLRYESNHLIDLSRYASKINIGSKVNFDPIDKNQIQLFNLESSKIEVILK |
| | (of full length) | NAIVYNSMYENFSTSFWIRIPKYFNSISLNNEYTIINCMENNSGWKVSLNYG |
| | | EIIWTLQDTQEIKQRVVFKYSQMINISDYINRWIFVTITNNRLNNSKIYINGR |
| | | LIDQKPISNLGNIHASNNIMFKLDGCRDTHRYIWIKYFNLFDKELNEKEIKDL |
| | | YDNQSNSGILKDFWGDYLQYDKPYYMLNLYDPNKYVDVNNVGIRGYMYL |
| | | KGPRGSVMTTNIYLNSSLYRGTKFIIKKYASGNKDNIVRNNDRVYINVVVKN |
| | | KEYRLATNASQAGVEKILSALEIPDVGNLSQVVVMKSKNDQGITNKCKMNL |
| | | QDNNGNDIGFIGFHQFNNIAKLVASNWYNRQIERSSRTLGCSWEFIPVED |
| | | GWGERPL |
| 159 | H_{C}-BoNT/A1-D1289Y | IINTSILNLRYESNHLIDLSRYASKINIGSKVNFDPIDKNQIQLFNLESSKIEVILK |
| | (of full length) | NAIVYNSMYENFSTSFWIRIPKYFNSISLNNEYTIINCMENNSGWKVSLNYG |
| | | EIIWTLQDTQEIKQRVVFKYSQMINISDYINRWIFVTITNNRLNNSKIYINGR |
| | | LIDQKPISNLGNIHASNNIMFKLDGCRDTHRYIWIKYFNLFDKELNEKEIKDL |
| | | YDNQSNSGILKDFWGDYLQYDKPYYMLNLYDPNKYVDVNNVGIRGYMYL |
| | | KGPRGSVMTTNIYLNSSLYRGTKFIIKKYASGNKDNIVRNNDRVYINVVVKN |
| | | KEYRLATNASQAGVEKILSALEIPDVGNLSQVVVMKSKNDQGITNKCKMNL |
| | | QDNNGNDIGFIGFHQFNNIAKLVASNWYNRQIERSSRTLGCSWEFIPVDY |
| | | GWGERPL |
| 160 | H_{C}-BoNT/A1-G1292R | IINTSILNLRYESNHLIDLSRYASKINIGSKVNFDPIDKNQIQLFNLESSKIEVILK |
| | (of full length) | NAIVYNSMYENFSTSFWIRIPKYFNSISLNNEYTIINCMENNSGWKVSLNYG |
| | | EIIWTLQDTQEIKQRVVFKYSQMINISDYINRWIFVTITNNRLNNSKIYINGR |
| | | LIDQKPISNLGNIHASNNIMFKLDGCRDTHRYIWIKYFNLFDKELNEKEIKDL |
| | | YDNQSNSGILKDFWGDYLQYDKPYYMLNLYDPNKYVDVNNVGIRGYMYL |
| | | KGPRGSVMTTNIYLNSSLYRGTKFIIKKYASGNKDNIVRNNDRVYINVVVKN |
| | | KEYRLATNASQAGVEKILSALEIPDVGNLSQVVVMKSKNDQGITNKCKMNL |
| | | QDNNGNDIGFIGFHQFNNIAKLVASNWYNRQIERSSRTLGCSWEFIPVDD |
| | | GWRERPL |
| 161 | H_{C}-BoNT/A1-G1292K | IINTSILNLRYESNHLIDLSRYASKINIGSKVNFDPIDKNQIQLFNLESSKIEVILK |
| | (of full length) | NAIVYNSMYENFSTSFWIRIPKYFNSISLNNEYTIINCMENNSGWKVSLNYG |
| | | EIIWTLQDTQEIKQRVVFKYSQMINISDYINRWIFVTITNNRLNNSKIYINGR |
| | | LIDQKPISNLGNIHASNNIMFKLDGCRDTHRYIWIKYFNLFDKELNEKEIKDL |
| | | YDNQSNSGILKDFWGDYLQYDKPYYMLNLYDPNKYVDVNNVGIRGYMYL |
| | | KGPRGSVMTTNIYLNSSLYRGTKFIIKKYASGNKDNIVRNNDRVYINVVVKN |
| | | KEYRLATNASQAGVEKILSALEIPDVGNLSQVVVMKSKNDQGITNKCKMNL |
| | | QDNNGNDIGFIGFHQFNNIAKLVASNWYNRQIERSSRTLGCSWEFIPVDD |
| | | GWKERPL |
| 162 | H_{C}-BoNT/A1-R1294S | IINTSILNLRYESNHLIDLSRYASKINIGSKVNFDPIDKNQIQLFNLESSKIEVILK |
| | (of full length) | NAIVYNSMYENFSTSFWIRIPKYFNSISLNNEYTIINCMENNSGWKVSLNYG |
| | | EIIWTLQDTQEIKQRVVFKYSQMINISDYINRWIFVTITNNRLNNSKIYINGR |
| | | LIDQKPISNLGNIHASNNIMFKLDGCRDTHRYIWIKYFNLFDKELNEKEIKDL |
| | | YDNQSNSGILKDFWGDYLQYDKPYYMLNLYDPNKYVDVNNVGIRGYMYL |
| | | KGPRGSVMTTNIYLNSSLYRGTKFIIKKYASGNKDNIVRNNDRVYINVVVKN |
| | | KEYRLATNASQAGVEKILSALEIPDVGNLSQVVVMKSKNDQGITNKCKMNL |
| | | QDNNGNDIGFIGFHQFNNIAKLVASNWYNRQIERSSRTLGCSWEFIPVDD |
| | | GWGESPL |
| 163 | H_{C}-BoNT/A1-R1294T | IINTSILNLRYESNHLIDLSRYASKINIGSKVNFDPIDKNQIQLFNLESSKIEVILK |
| | (of full length) | NAIVYNSMYENFSTSFWIRIPKYFNSISLNNEYTIINCMENNSGWKVSLNYG |
| | | EIIWTLQDTQEIKQRVVFKYSQMINISDYINRWIFVTITNNRLNNSKIYINGR |
| | | LIDQKPISNLGNIHASNNIMFKLDGCRDTHRYIWIKYFNLFDKELNEKEIKDL |
| | | YDNQSNSGILKDFWGDYLQYDKPYYMLNLYDPNKYVDVNNVGIRGYMYL |
| | | KGPRGSVMTTNIYLNSSLYRGTKFIIKKYASGNKDNIVRNNDRVYINVVVKN |
| | | KEYRLATNASQAGVEKILSALEIPDVGNLSQVVVMKSKNDQGITNKCKMNL |
| | | QDNNGNDIGFIGFHQFNNIAKLVASNWYNRQIERSSRTLGCSWEFIPVDD |
| | | GWGETPL |
| 164 | H_{C}-BoNT/A1-P1295S | IINTSILNLRYESNHLIDLSRYASKINIGSKVNFDPIDKNQIQLFNLESSKIEVILK |
| | (of full length) | NAIVYNSMYENFSTSFWIRIPKYFNSISLNNEYTIINCMENNSGWKVSLNYG |
| | | EIIWTLQDTQEIKQRVVFKYSQMINISDYINRWIFVTITNNRLNNSKIYINGR |
| | | LIDQKPISNLGNIHASNNIMFKLDGCRDTHRYIWIKYFNLFDKELNEKEIKDL |
| | | YDNQSNSGILKDFWGDYLQYDKPYYMLNLYDPNKYVDVNNVGIRGYMYL |
| | | KGPRGSVMTTNIYLNSSLYRGTKFIIKKYASGNKDNIVRNNDRVYINVVVKN |
| | | KEYRLATNASQAGVEKILSALEIPDVGNLSQVVVMKSKNDQGITNKCKMNL |
| | | QDNNGNDIGFIGFHQFNNIAKLVASNWYNRQIERSSRTLGCSWEFIPVDD |
| | | GWGERSL |
| 165 | H_{C}-BoNT/A1-P1295T | IINTSILNLRYESNHLIDLSRYASKINIGSKVNFDPIDKNQIQLFNLESSKIEVILK |
| | (of full length) | NAIVYNSMYENFSTSFWIRIPKYFNSISLNNEYTIINCMENNSGWKVSLNYG |
| | | EIIWTLQDTQEIKQRVVFKYSQMINISDYINRWIFVTITNNRLNNSKIYINGR |
| | | LIDQKPISNLGNIHASNNIMFKLDGCRDTHRYIWIKYFNLFDKELNEKEIKDL |
| | | YDNQSNSGILKDFWGDYLQYDKPYYMLNLYDPNKYVDVNNVGIRGYMYL |
| | | KGPRGSVMTTNIYLNSSLYRGTKFIIKKYASGNKDNIVRNNDRVYINVVVKN |
| | | KEYRLATNASQAGVEKILSALEIPDVGNLSQVVVMKSKNDQGITNKCKMNL |
| | | QDNNGNDIGFIGFHQFNNIAKLVASNWYNRQIERSSRTLGCSWEFIPVDD |
| | | GWGERTL |
| 166 | H_{C}-BoNT/A2-K915Q | IVNTSILSIVYKKDDLIDLSRYGAKINIGDRVYYDSIDKNQIQLINLESSTIEVILK |
| | (of full length) | NAIVYNSMYENFSTSFWIKIPKYFSKINLNNEYTIINCIENNSGWKVSLNYGEI |
| | | IWTLQDNKQNIQRVVFKYSQMVNISDYINRWIFVTITNNRLTKSKIYINGRLI |
| | | DQKPISNLGNIHASNKIMFKLDGCRDPRRYIMIKYFNLFDKELNEKEIKDLYD |
| | | SQSNSGILKDFWGNYLQYDKPYYMLNLFDPNKYVDVNNIGIRGYMYLKGP |
| | | RGSVVTTNIYLNSTLYEGTKFIIKKYASGNEDNIVRNNDRVYINVVVKNKEYR |
| | | LATNASQAGVEKILSALEIPDVGNLSQVVVMKSKDDQGIRNKCKMNLQDN |
| | | NGNDIGFIGFHLYDNIAKLVASNWYNRQVGKASRTFGCSWEFIPVDDGW |
| | | GESSL |
| 167 | H_{C}-BoNT/A2-T923K (of | IVNTSILSIVYKKDDLIDLSRYGAKINIGDRVYYDSIDKNQIKLINLESSKIEVILK |
| | full length) | NAIVYNSMYENFSTSFWIKIPKYFSKINLNNEYTIINCIENNSGWKVSLNYGEI |
| | | IWTLQDNKQNIQRVVFKYSQMVNISDYINRWIFVTITNNRLTKSKIYINGRLI |
| | | DQKPISNLGNIHASNKIMFKLDGCRDPRRYIMIKYFNLFDKELNEKEIKDLYD |
| | | SQSNSGILKDFWGNYLQYDKPYYMLNLFDPNKYVDVNNIGIRGYMYLKGP |
| | | RGSVVTTNIYLNSTLYEGTKFIIKKYASGNEDNIVRNNDRVYINVVVKNKEYR |
| | | LATNASQAGVEKILSALEIPDVGNLSQVVVMKSKDDQGIRNKCKMNLQDN |
| | | NGNDIGFIGFHLYDNIAKLVASNWYNRQVGKASRTFGCSWEFIPVDDGW |
| | | GESSL |
| 168 | H_{C}-BoNT/A2-S1090N | IVNTSILSIVYKKDDLIDLSRYGAKINIGDRVYYDSIDKNQIKLINLESSTIEVILK |
| | (of full length) | NAIVYNSMYENFSTSFWIKIPKYFSKINLNNEYTIINCIENNSGWKVSLNYGEI |
| | | IWTLQDNKQNIQRVVFKYSQMVNISDYINRWIFVTITNNRLTKSKIYINGRLI |
| | | DQKPISNLGNIHASNKIMFKLDGCRDPRRYIMIKYFNLFDKELNEKEIKDLYD |
| | | NQSNSGILKDFWGNYLQYDKPYYMLNLFDPNKYVDVNNIGIRGYMYLKGP |
| | | RGSVVTTNIYLNSTLYEGTKFIIKKYASGNEDNIVRNNDRVYINVVVKNKEYR |
| | | LATNASQAGVEKILSALEIPDVGNLSQVVVMKSKDDQGIRNKCKMNLQDN |
| | | NGNDIGFIGFHLYDNIAKLVASNWYNRQVGKASRTFGCSWEFIPVDDGW |
| | | GESSL |
| 169 | H_{C}-BoNT/A2-N1103D | IVNTSILSIVYKKDDLIDLSRYGAKINIGDRVYYDSIDKNQIKLINLESSTIEVILK |
| | (of full length) | NAIVYNSMYENFSTSFWIKIPKYFSKINLNNEYTIINCIENNSGWKVSLNYGEI |
| | | IWTLQDNKQNIQRVVFKYSQMVNISDYINRWIFVTITNNRLTKSKIYINGRLI |
| | | DQKPISNLGNIHASNKIMFKLDGCRDPRRYIMIKYFNLFDKELNEKEIKDLYD |
| | | SQSNSGILKDFWGDYLQYDKPYYMLNLFDPNKYVDVNNIGIRGYMYLKGP |
| | | RGSVVTTNIYLNSTLYEGTKFIIKKYASGNEDNIVRNNDRVYINVVVKNKEYR |
| | | LATNASQAGVEKILSALEIPDVGNLSQVVVMKSKDDQGIRNKCKMNLQDN |
| | | NGNDIGFIGFHLYDNIAKLVASNWYNRQVGKASRTFGCSWEFIPVDDGW |
| | | GESSL |
| 170 | H_{C}-BoNT/A2-F1117Y | IVNTSILSIVYKKDDLIDLSRYGAKINIGDRVYYDSIDKNQIKLINLESSTIEVILK |
| | (of full length) | NAIVYNSMYENFSTSFWIKIPKYFSKINLNNEYTIINCIENNSGWKVSLNYGEI |
| | | IWTLQDNKQNIQRVVFKYSQMVNISDYINRWIFVTITNNRLTKSKIYINGRLI |
| | | DQKPISNLGNIHASNKIMFKLDGCRDPRRYIMIKYFNLFDKELNEKEIKDLYD |
| | | SQSNSGILKDFWGNYLQYDKPYYMLNLYDPNKYVDVNNIGIRGYMYLKGP |
| | | RGSVVTTNIYLNSTLYEGTKFIIKKYASGNEDNIVRNNDRVYINVVVKNKEYR |
| | | LATNASQAGVEKILSALEIPDVGNLSQVVVMKSKDDQGIRNKCKMNLQDN |
| | | NGNDIGFIGFHLYDNIAKLVASNWYNRQVGKASRTFGCSWEFIPVDDGW |
| | | GESSL |
| 171 | H_{C}-BoNT/A2-E1156M | IVNTSILSIVYKKDDLIDLSRYGAKINIGDRVYYDSIDKNQIKLINLESSTIEVILK |
| | (of full length) | NAIVYNSMYENFSTSFWIKIPKYFSKINLNNEYTIINCIENNSGWKVSLNYGEI |
| | | IWTLQDNKQNIQRVVFKYSQMVNISDYINRWIFVTITNNRLTKSKIYINGRLI |
| | | DQKPISNLGNIHASNKIMFKLDGCRDPRRYIMIKYFNLFDKELNEKEIKDLYD |
| | | SQSNSGILKDFWGNYLQYDKPYYMLNLFDPNKYVDVNNIGIRGYMYLKGP |
| | | RGSVVTTNIYLNSTLYMGTKFIIKKYASGNEDNIVRNNDRVYINVVVKNKEY |
| | | RLATNASQAGVEKILSALEIPDVGNLSQVVVMKSKDDQGIRNKCKMNLQD |
| | | NNGNDIGFIGFHLYDNIAKLVASNWYNRQVGKASRTFGCSWEFIPVDDG |
| | | WGESSL |
| 172 | H_{C}-BoNT/A2-E1170K | IVNTSILSIVYKKDDLIDLSRYGAKINIGDRVYYDSIDKNQIKLINLESSTIEVILK |
| | (of full length) | NAIVYNSMYENFSTSFWIKIPKYFSKINLNNEYTIINCIENNSGWKVSLNYGEI |
| | | IWTLQDNKQNIQRVVFKYSQMVNISDYINRWIFVTITNNRLTKSKIYINGRLI |
| | | DQKPISNLGNIHASNKIMFKLDGCRDPRRYIMIKYFNLFDKELNEKEIKDLYD |
| | | SQSNSGILKDFWGNYLQYDKPYYMLNLFDPNKYVDVNNIGIRGYMYLKGP |
| | | RGSVVTTNIYLNSTLYEGTKFIIKKYASGNKDNIVRNNDRVYINVVVKNKEYR |
| | | LATNASQAGVEKILSALEIPDVGNLSQVVVMKSKDDQGIRNKCKMNLQDN |
| | | NGNDIGFIGFHLYDNIAKLVASNWYNRQVGKASRTFGCSWEFIPVDDGW |
| | | GESSL |
| 173 | H_{C}-BoNT/A2-D1227N | IVNTSILSIVYKKDDLIDLSRYGAKINIGDRVYYDSIDKNQIKLINLESSTIEVILK |
| | (of full length) | NAIVYNSMYENFSTSFWIKIPKYFSKINLNNEYTIINCIENNSGWKVSLNYGEI |
| | | IWTLQDNKQNIQRVVFKYSQMVNISDYINRWIFVTITNNRLTKSKIYINGRLI |
| | | DQKPISNLGNIHASNKIMFKLDGCRDPRRYIMIKYFNLFDKELNEKEIKDLYD |
| | | SQSNSGILKDFWGNYLQYDKPYYMLNLFDPNKYVDVNNIGIRGYMYLKGP |
| | | RGSVVTTNIYLNSTLYEGTKFIIKKYASGNEDNIVRNNDRVYINVVVKNKEYR |
| | | LATNASQAGVEKILSALEIPDVGNLSQVVVMKSKNDQGIRNKCKMNLQDN |
| | | NGNDIGFIGFHLYDNIAKLVASNWYNRQVGKASRTFGCSWEFIPVDDGW |
| | | GESSL |
| 174 | H_{C}-BoNT/A2-L1254Q | IVNTSILSIVYKKDDLIDLSRYGAKINIGDRVYYDSIDKNQIKLINLESSTIEVILK |
| | (of full length) | NAIVYNSMYENFSTSFWIKIPKYFSKINLNNEYTIINCIENNSGWKVSLNYGEI |
| | | IWTLQDNKQNIQRVVFKYSQMVNISDYINRWIFVTITNNRLTKSKIYINGRLI |
| | | DQKPISNLGNIHASNKIMFKLDGCRDPRRYIMIKYFNLFDKELNEKEIKDLYD |
| | | SQSNSGILKDFWGNYLQYDKPYYMLNLFDPNKYVDVNNIGIRGYMYLKGP |
| | | RGSVVTTNIYLNSTLYEGTKFIIKKYASGNEDNIVRNNDRVYINVVVKNKEYR |
| | | LATNASQAGVEKILSALEIPDVGNLSQVVVMKSKDDQGIRNKCKMNLQDN |
| | | NGNDIGFIGFHQYDNIAKLVASNWYNRQVGKASRTFGCSWEFIPVDDGW |
| | | GESSL |
| 175 | H_{C}-BoNT/A2-Y1255F | IVNTSILSIVYKKDDLIDLSRYGAKINIGDRVYYDSIDKNQIKLINLESSTIEVILK |
| | (of full length) | NAIVYNSMYENFSTSFWIKIPKYFSKINLNNEYTIINCIENNSGWKVSLNYGEI |
| | | IWTLQDNKQNIQRVVFKYSQMVNISDYINRWIFVTITNNRLTKSKIYINGRLI |
| | | DQKPISNLGNIHASNKIMFKLDGCRDPRRYIMIKYFNLFDKELNEKEIKDLYD |
| | | SQSNSGILKDFWGNYLQYDKPYYMLNLFDPNKYVDVNNIGIRGYMYLKGP |
| | | RGSVVTTNIYLNSTLYEGTKFIIKKYASGNEDNIVRNNDRVYINVVVKNKEYR |
| | | LATNASQAGVEKILSALEIPDVGNLSQVVVMKSKDDQGIRNKCKMNLQDN |
| | | NGNDIGFIGFHLFDNIAKLVASNWYNRQVGKASRTFGCSWEFIPVDDGW |
| | | GESSL |
| 176 | H_{C}-BoNT/A2-D1256N | IVNTSILSIVYKKDDLIDLSRYGAKINIGDRVYYDSIDKNQIKLINLESSTIEVILK |
| | (of full length) | NAIVYNSMYENFSTSFWIKIPKYFSKINLNNEYTIINCIENNSGWKVSLNYGEI |
| | | IWTLQDNKQNIQRVVFKYSQMVNISDYINRWIFVTITNNRLTKSKIYINGRLI |
| | | DQKPISNLGNIHASNKIMFKLDGCRDPRRYIMIKYFNLFDKELNEKEIKDLYD |
| | | SQSNSGILKDFWGNYLQYDKPYYMLNLFDPNKYVDVNNIGIRGYMYLKGP |
| | | RGSVVTTNIYLNSTLYEGTKFIIKKYASGNEDNIVRNNDRVYINVVVKNKEYR |
| | | LATNASQAGVEKILSALEIPDVGNLSQVVVMKSKDDQGIRNKCKMNLQDN |
| | | NGNDIGFIGFHLYNNIAKLVASNWYNRQVGKASRTFGCSWEFIPVDDGW |
| | | GESSL |
| 177 | BoNT/A1 - KR10/ | MPFVNKQFNYRDPVNGVDIAYIKIPNAGQMQPVKAFKIHNKIWVIPERDT |
| | R1156M (of full | FTNPEEGDLNPPPEAKQVPVSYYDSTYLSTDNEKDNYLKGVTKLFERIYSTDL |
| | length) | GRMLLTSIVRGIPFWGGSTIDTELKVIDTNCINVIQPDGSYRSEELNLVIIGPS |
| | | ADIIQFECKSFGHEVLNLTRNGYGSTQYIRFSPDFTFGFEESLEVDTNPLLGA |
| | | GKFATDPAVTLAHELIHAGHRLYGIAINPNRVFKVNTNAYYEMSGLEVSFEE |
| | | LRTFGGHDAKFIDSLQENEFRLYYYNRFRDIASTLNRAKSIVGTTASLQYMK |
| | | NVFKEKYLLSEDTSGKFSVDRLRFDKLYRMLTEIYTEDNFVKFFKVLNRKTYL |
| | | NFDKAVFRINIVPRVNYTIYDGFNLRNTNLAANFNGQNTEINNMNFTRLK |
| | | NFTGLFEFYKLLCVRGIITSKTKSLDKGYNKALNDLCIKVNNWDLFFSPSEDN |
| | | FTNDLNKGEEITSDTNIEAAEENISLDLIQQYYLTFNFDNEPENISIENLSSDII |
| | | GQLELMPNIERFPNGKKYELDKYTMFHYLRAQEFEHGKSRIALTNSVNEALL |
| | | NPSRVYTFFSSDYVKKVNKATEAAMFLGWVEQLVYDFTDETSEVSTTDKIA |
| | | DITIIIPYIGPALNIGNMLYKDDFVGALIFSGAVILLEFIPEIAIPVLGTFALVSYI |
| | | ANKVLTVQTIDNALSKRNEKWDEVYKYIVTNWLAKVNTQIDLIRKKMKETL |
| | | ENQAEATKAIINYQYNQYTEEEKNNINFNIDDLSSKLNESINKAMININKFLN |
| | | QCSVSYLMNSMIPYGVKRLEDFDASLKDALLKYIYDNRGTLIGQVDRLKDKV |
| | | NNTLSTDIPFQLSKYVDNQRLLSTFTEYIKNIINTSILNLRYESNHLIDLSRYASK |
| | | INIGSKVNFDPIDKNQIQLFNLESSKIEVILKNAIVYNSMYENFSTSFWIRIPKY |
| | | FNSISLNNEYTIINCMENNSGWKVSLNYGEIIWTLQDTQEIKQRVVFKYSQ |
| | | MINISDYINRWIFVTITNNRLNNSKIYINGRLIDQKPISNLGNIHASNNIMFKL |
| | | DGCRDTHRYIWIKYFNLFDKELNEKEIKDLYDNQSNSGILKDFWGDYLQYD |
| | | KPYYMLNLYDPNKYVDVNNVGIRGYMYLKGPRGSVMTTNIYLNSSLYMGT |
| | | KFIIKKYASGNKDNIVRNNDRVYINVVVKNKEYRLATNASQAGVEKILSALEI |
| | | PDVGNLSQVVVMKSKNDQGITNKCKMNLQDNNGNDIGFIGFHQFNNIAK |
| | | LVASNWYNRQIERSSRTLGCSWEFIPVDDGWGERPL |
| 178 | BoNT/A1 - KR10/ | MPFVNKQFNYRDPVNGVDIAYIKIPNAGQMQPVKAFKIHNKIWVIPERDT |
| | T1232R (of full length) | FTNPEEGDLNPPPEAKQVPVSYYDSTYLSTDNEKDNYLKGVTKLFERIYSTDL |
| | | GRMLLTSIVRGIPFWGGSTIDTELKVIDTNCINVIQPDGSYRSEELNLVIIGPS |
| | | ADIIQFECKSFGHEVLNLTRNGYGSTQYIRFSPDFTFGFEESLEVDTNPLLGA |
| | | GKFATDPAVTLAHELIHAGHRLYGIAINPNRVFKVNTNAYYEMSGLEVSFEE |
| | | LRTFGGHDAKFIDSLQENEFRLYYYNRFRDIASTLNRAKSIVGTTASLQYMK |
| | | NVFKEKYLLSEDTSGKFSVDRLRFDKLYRMLTEIYTEDNFVKFFKVLNRKTYL |
| | | NFDKAVFRINIVPRVNYTIYDGFNLRNTNLAANFNGQNTEINNMNFTRLK |
| | | NFTGLFEFYKLLCVRGIITSKTKSLDKGYNKALNDLCIKVNNWDLFFSPSEDN |
| | | FTNDLNKGEEITSDTNIEAAEENISLDLIQQYYLTFNFDNEPENISIENLSSDII |
| | | GQLELMPNIERFPNGKKYELDKYTMFHYLRAQEFEHGKSRIALTNSVNEALL |
| | | NPSRVYTFFSSDYVKKVNKATEAAMFLGWVEQLVYDFTDETSEVSTTDKIA |
| | | DITIIIPYIGPALNIGNMLYKDDFVGALIFSGAVILLEFIPEIAIPVLGTFALVSYI |
| | | ANKVLTVQTIDNALSKRNEKWDEVYKYIVTNWLAKVNTQIDLIRKKMKETL |
| | | ENQAEATKAIINYQYNQYTEEEKNNINFNIDDLSSKLNESINKAMININKFLN |
| | | QCSVSYLMNSMIPYGVKRLEDFDASLKDALLKYIYDNRGTLIGQVDRLKDKV |
| | | NNTLSTDIPFQLSKYVDNQRLLSTFTEYIKNIINTSILNLRYESNHLIDLSRYASK |
| | | INIGSKVNFDPIDKNQIQLFNLESSKIEVILKNAIVYNSMYENFSTSFWIRIPKY |
| | | FNSISLNNEYTIINCMENNSGWKVSLNYGEIIWTLQDTQEIKQRVVFKYSQ |
| | | MINISDYINRWIFVTITNNRLNNSKIYINGRLIDQKPISNLGNIHASNNIMFKL |
| | | DGCRDTHRYIWIKYFNLFDKELNEKEIKDLYDNQSNSGILKDFWGDYLQYD |
| | | KPYYMLNLYDPNKYVDVNNVGIRGYMYLKGPRGSVMTTNIYLNSSLYRGT |
| | | KFIIKKYASGNKDNIVRNNDRVYINVVVKNKEYRLATNASQAGVEKILSALEI |
| | | PDVGNLSQVVVMKSKNDQGIRNKCKMNLQDNNGNDIGFIGFHQFNNIA |
| | | KLVASNWYNRQIERSSRTLGCSWEFIPVDDGWGERPL |
| 179 | H_{C}-BoNT/B | SEILNNIILNLRYRDNNLIDLSGYGAKVEVYDGVKLNDKNQFKLTSSADSKIR |
| | | VTQNQNIIFNSMFLDFSVSFWIRIPKYRNDDIQNYIHNEYTIINCMKNNSG |
| | | WKISIRGNRIIWTLIDINGKTKSVFFEYNIREDISEYINRWFFVTITNNLDNAKI |
| | | YINGTLESNMDIKDIGEVIVNGEITFKLDGDVDRTQFIWMKYFSIFNTQLNQ |
| | | SNIKEIYKIQSYSEYLKDFWGNPLMYNKEYYMFNAGNKNSYIKLVKDSSVGE |
| | | ILIRSKYNQNSNYINYRNLYIGEKFIIRRESNSQSINDDIVRKEDYIHLDLVLHH |
| | | EEWRVYAYKYFKEQEEKLFLSIISDSNEFYKTIEIKEYDEQPSYSCQLLFKKDEE |
| | | STDDIGLIGIHRFYESGVLRKKYKDYFCISKWYLKEVKRKPYKSNLGCNWQFI |
| | | PKDEGWTE |
| 180 | H_{C}-BoNT/C | SKILSLQNRKNTLVDTSGYNAEVSEEGDVQLNPIFPFDFKLGSSGEDRGKVIV |
| | | TQNENIVYNSMYESFSISFWIRINKWVSNLPGYTIIDSVKNNSGWSIGIISNF |
| | | LVFTLKQNEDSEQSINFSYDISNNAPGYNKWFFVTVTNNMMGNMKIYING |
| | | KLIDTIKVKELTGINFSKTITFEINKIPDTGLITSDSDNINMWIRDFYIFAKELDG |
| | | KDINILFNSLQYTNVVKDYWGNDLRYNKEYYMVNIDYLNRYMYANSRQIV |
| | | FNTRRNNNDFNEGYKIIIKRIRGNTNDTRVRGGDILYFDMTINNKAYNLFM |
| | | KNETMYADNHSTEDIYAIGLREQTKDINDNIIFQIQPMNNTYYYASQIFKSN |
| | | FNGENISGICSIGTYRFRLGGDWYRHNYLVPTVKQGNYASLLESTSTHWGF |
| | | VPVSE |
| 181 | H_{C}-BoNT/D | SINDSKILSLQNKKNALVDTSGYNAEVRVGDNVQLNTIYTNDFKLSSSGDKII |
| | | VNLNNNILYSAIYENSSVSFWIKISKDLTNSHNEYTIINSIEQNSGWKLCIRNG |
| | | NIEWILQDVNRKYKSLIFDYSESLSHTGYTNKWFFVTITNNIMGYMKLYING |
| | | ELKQSQKIEDLDEVKLDKTIVFGIDENIDENQMLWIRDFNIFSKELSNEDINIV |
| | | YEGQILRNVIKDYWGNPLKFDTEYYIINDNYIDRYIAPESNVLVLVQYPDRSK |
| | | LYTGNPITIKSVSDKNPYSRILNGDNIILHMLYNSRKYMIIRDTDTIYATQGGE |
| | | CSQNCVYALKLQSNLGNYGIGIFSIKNIVSKNKYCSQIFSSFRENTMLLADIYK |
| | | PWRFSFKNAYTPVAVTNYETKLLSTSSFWKFISRDPGWVE |
| 182 | H_{C}-BoNT/E | KRIKSSSVLNMRYKNDKYVDTSGYDSNININGDVYKYPTNKNQFGIYNDKLS |
| | | EVNISQNDYIIYDNKYKNFSISFWVRIPNYDNKIVNVNNEYTIINCMRDNNS |
| | | GWKVSLNHNEIIWTLQDNAGINQKLAFNYGNANGISDYINKWIFVTITNDR |
| | | LGDSKLYINGNLIDQKSILNLGNIHVSDNILFKIVNCSYTRYIGIRYFNIFDKEL |
| | | DETEIQTLYSNEPNTNILKDFWGNYLLYDKEYYLLNVLKPNNFIDRRKDSTLSI |
| | | NNIRSTILLANRLYSGIKVKIQRVNNSSTNDNLVRKNDQVYINFVASKTHLFP |
| | | LYADTATTNKEKTIKISSSGNRFNQVVVMNSVGNNCTMNFKNNNGNNIG |
| | | LLGFKADTVVASTWYYTHMRDHTNSNGCFWNFISEEHGWQEK |
| 183 | H_{C}-BoNT/F | KKIKDNSILDMRYENNKFIDISGYGSNISINGDVYIYSTNRNQFGIYSSKPSEV |
| | | NIAQNNDIIYNGRYQNFSISFWVRIPKYFNKVNLNNEYTIIDCIRNNNSGWK |
| | | ISLNYNKIIWTLQDTAGNNQKLVFNYTQMISISDYINKWIFVTITNNRLGNS |
| | | RIYINGNLIDEKSISNLGDIHVSDNILFKIVGCNDTRYVGIRYFKVFDTELGKTE |
| | | IETLYSDEPDPSILKDFWGNYLLYNKRYYLLNLLRTDKSITQNSNFLNINQQR |
| | | GVYQKPNIFSNTRLYTGVEVIIRKNGSTDISNTDNFVRKNDLAYINVVDRDV |
| | | EYRLYADISIAKPEKIIKLIRTSNSNNSLGQIIVMDSIGNNCTMNFQNNNGG |
| | | NIGLLGFHSNNLVASSWYYNNIRKNTSSNGCFWSFISKEHGWQEN |
| 184 | H_{C}-BoNT/G | SNISSNAILSLSYRGGRLIDSSGYGATMNVGSDVIFNDIGNGQFKLNNSENS |
| | | NITAHQSKFVVYDSMFDNFSINFWVRTPKYNNNDIQTYLQNEYTIISCIKND |
| | | SGWKVSIKGNRIIWTLIDVNAKSKSIFFEYSIKDNISDYINKWFSITITNDRLG |
| | | NANIYINGSLKKSEKILNLDRINSSNDIDFKLINCTDTTKFVWIKDFNIFGREL |
| | | NATEVSSLYWIQSSTNTLKDFWGNPLRYDTQYYLFNQGMQNIYIKYFSKAS |
| | | MGETAPRTNFNNAAINYQNLYLGLRFIIKKASNSRNINNDNIVREGDYIYLNI |
| | | DNISDESYRVYVLVNSKEIQTQLFLAPINDDPTFYDVLQIKKYYEKTTYNCQIL |
| | | CEKDTKTFGLFGIGKFVKDYGYVWDTYDNYFCISQWYLRRISENINKLRLGC |
| | | NWQFIPVDEGWTE |
| 185 | H_{C}-BoNT/H | GELKYNCILNIKYEMDRDKLVDSSGYRSRINIGTGVKFSEIDKNQVQLSNLE |
| | | SSKIEVILNNGVIYNSMYENFSTSFWIRIPKYFRNINNEYKIISCMQNNSGWE |
| | | VSLNFSNMNSKIIWTLQDTEGIKKTVVFQYTQNINISDYINRWIFVTITNNRL |
| | | SNSKIYINGRLINEESISDLGNIHASNNIMFKLDGCRDPHRYIWIKYFNLFDKE |
| | | LNKKEIKDLYDNQSNSGILKDFWGDYLQYDKPYYMLNLYDPNKYLDVNNV |
| | | GIRGYMYLKGPRGRIVTTNIYLNSTLYMGTKFIIKKYASGNKDNIVRNNDRV |
| | | YINVVVKNKEYRLATNASQAGVEKILSAVEIPDVGNLSQVVVMKSENDQGI |
| | | RNKCKMNLQDNNGNDIGFIGFHQFNNIAKLVASNWYNRQIGKASRTFGC |
| | | SWEFIPVDDGWGESSL |
| 186 | H_{C}-BoNT/EN | GKIQDLSGENTPLTLGENLHIVNGRDNQAVRLNNQLDSKLEIQSRPNIHFTA |
| | | FEDFSISIWIRCSMLRNNRNRGQKYTIIQQFNKYGWQLAIQDSVFVWTLHD |
| | | TFNNQIQLTSGSALTNKNYLLQNFWLHITVTNKRSEKSRLYINGVLQDQKDI |
| | | SVLGNCHPKEPILFSIQDNSDPNYFVRFEQFNVYRKALTDSEVNRLYWKYFE |
| | | GSYLRDVWGERLTYNRDYYMQLSTLPGRGIKREYRTWSGFDYIILSELGTQK |
| | | IPTHEVTYPKLYQGQKITIHSDGKNLEPHVKSNKNIRLKIDDFYIGVVNPFKLP |
| | | EWRPESGAYVVTTYNHAEDLCLYFRTRSSSQSLYYGQLIMNDGRNKSLLNY |
| | | TLKGSTYWIWSSAWYYENYNTSSKTAGNWYFIPVDEGWKED |
| 187 | LC-Hn BoNT/A1 - H_{C}- | SLDKGYNKALNDLCIKVNNWDLFFSPSEDNFTNDLNKGEEITSDTNIEAAEE |
| | BoNT/B | NISLDLIQQYYLTFNFDNEPENISIENLSSDIIGQLELMPNIERFPNGKKYELDK |
| | | YTMFHYLRAQEFEHGKSRIALTNSVNEALLNPSRVYTFFSSDYVKKVNKATE |
| | | AAMFLGWVEQLVYDFTDETSEVSTTDKIADITIIIPYIGPALNIGNMLYKDDF |
| | | VGALIFSGAVILLEFIPEIAIPVLGTFALVSYIANKVLTVQTIDNALSKRNEKWD |
| | | EVYKYIVTNWLAKVNTQIDLIRKKMKETLENQAEATKAIINYQYNQYTEEEK |
| | | NNINFNIDDLSSKLNESINKAMININKFLNQCSVSYLMNSMIPYGVKRLEDF |
| | | DASLKDALLKYIYDNRGTLIGQVDRLKDKVNNTLSTDIPFQLSKYVDNQRLLS |
| | | TFTEYIKNIINTSILNLRYESNHLIDLSRYASKINIGSKVNFDPIDKNQIQLFNLE |
| | | SSKIEVILKNAIVYNSMYENFSTSFWIRIPKYFNSISLNNEYTIINCMENNSGW |
| | | KVSLNYGEIIWTLQDTQEIKQRVVFKYSQMINISDYINRWIFVTITNNRLNNS |
| | | KIYINGRLIDQKPISNLGNIHASNNIMFKLDGCRDTHRYIWIKYFNLFDKELN |
| | | EKEIKDLYDNQSNSGILKDFWGDYLQYDKPYYMLNLYDPNKYVDVNNVGI |
| | | RGYMYLKGPRGSVMTTNIYLNSSLYRGTKFIIKKYASGNKDNIVRNNDRVYI |
| | | NVVVKNKEYRLATNASQAGVEKILSALEIPDVGNLSQVVVMKSKNDQGITN |
| | | KCKMNLQDNNGNDIGFIGFHQFNNIAKLVASNWYNRQIERSSRTLGCSW |
| | | EFIPVDDGWGERPLSEILNNIILNLRYRDNNLIDLSGYGAKVEVYDGVKLND |
| | | KNQFKLTSSADSKIRVTQNQNIIFNSMFLDFSVSFWIRIPKYRNDDIQNYIHN |
| | | EYTIINCMKNNSGWKISIRGNRIIWTLIDINGKTKSVFFEYNIREDISEYINRW |
| | | FFVTITNNLDNAKIYINGTLESNMDIKDIGEVIVNGEITFKLDGDVDRTQFIW |
| | | MKYFSIFNTQLNQSNIKEIYKIQSYSEYLKDFWGNPLMYNKEYYMFNAGNK |
| | | NSYIKLVKDSSVGEILIRSKYNQNSNYINYRNLYIGEKFIIRRESNSQSINDDIV |
| | | RKEDYIHLDLVLHHEEWRVYAYKYFKEQEEKLFLSIISDSNEFYKTIEIKEYDEQ |
| | | PSYSCQLLFKKDEESTDDIGLIGIHRFYESGVLRKKYKDYFCISKWYLKEVKRK |
| | | PYKSNLGCNWQFIPKDEGWTE |
| 188 | LC-Hn BoNT/A1 - H_{C} | SLDKGYNKALNDLCIKVNNWDLFFSPSEDNFTNDLNKGEEITSDTNIEAAEE |
| | BoNT/C | NISLDLIQQYYLTFNFDNEPENISIENLSSDIIGQLELMPNIERFPNGKKYELDK |
| | | YTMFHYLRAQEFEHGKSRIALTNSVNEALLNPSRVYTFFSSDYVKKVNKATE |
| | | AAMFLGWVEQLVYDFTDETSEVSTTDKIADITIIIPYIGPALNIGNMLYKDDF |
| | | VGALIFSGAVILLEFIPEIAIPVLGTFALVSYIANKVLTVQTIDNALSKRNEKWD |
| | | EVYKYIVTNWLAKVNTQIDLIRKKMKETLENQAEATKAIINYQYNQYTEEEK |
| | | NNINFNIDDLSSKLNESINKAMININKFLNQCSVSYLMNSMIPYGVKRLEDF |
| | | DASLKDALLKYIYDNRGTLIGQVDRLKDKVNNTLSTDIPFQLSKYVDNQRLLS |
| | | TFTEYIKNIINTSILNLRYESNHLIDLSRYASKINIGSKVNFDPIDKNQIQLFNLE |
| | | SSKIEVILKNAIVYNSMYENFSTSFWIRIPKYFNSISLNNEYTIINCMENNSGW |
| | | KVSLNYGEIIWTLQDTQEIKQRVVFKYSQMINISDYINRWIFVTITNNRLNNS |
| | | KIYINGRLIDQKPISNLGNIHASNNIMFKLDGCRDTHRYIWIKYFNLFDKELN |
| | | EKEIKDLYDNQSNSGILKDFWGDYLQYDKPYYMLNLYDPNKYVDVNNVGI |
| | | RGYMYLKGPRGSVMTTNIYLNSSLYRGTKFIIKKYASGNKDNIVRNNDRVYI |
| | | NVVVKNKEYRLATNASQAGVEKILSALEIPDVGNLSQVVVMKSKNDQGITN |
| | | KCKMNLQDNNGNDIGFIGFHQFNNIAKLVASNWYNRQIERSSRTLGCSW |
| | | EFIPVDDGWGERPLSKILSLQNRKNTLVDTSGYNAEVSEEGDVQLNPIFPFD |
| | | FKLGSSGEDRGKVIVTQNENIVYNSMYESFSISFWIRINKWVSNLPGYTIIDS |
| | | VKNNSGWSIGIISNFLVFTLKQNEDSEQSINFSYDISNNAPGYNKWFFVTVT |
| | | NNMMGNMKIYINGKLIDTIKVKELTGINFSKTITFEINKIPDTGLITSDSDNIN |
| | | MWIRDFYIFAKELDGKDINILFNSLQYTNVVKDYWGNDLRYNKEYYMVNI |
| | | DYLNRYMYANSRQIVFNTRRNNNDFNEGYKIIIKRIRGNTNDTRVRGGDILY |
| | | FDMTINNKAYNLFMKNETMYADNHSTEDIYAIGLREQTKDINDNIIFQIQP |
| | | MNNTYYYASQIFKSNFNGENISGICSIGTYRFRLGGDWYRHNYLVPTVKQG |
| | | NYASLLESTSTHWGFVPVSE |
| 189 | LC-Hn BoNT/A1 - H_{C}- | SLDKGYNKALNDLCIKVNNWDLFFSPSEDNFTNDLNKGEEITSDTNIEAAEE |
| | BoNT/D | NISLDLIQQYYLTFNFDNEPENISIENLSSDIIGQLELMPNIERFPNGKKYELDK |
| | | YTMFHYLRAQEFEHGKSRIALTNSVNEALLNPSRVYTFFSSDYVKKVNKATE |
| | | AAMFLGWVEQLVYDFTDETSEVSTTDKIADITIIIPYIGPALNIGNMLYKDDF |
| | | VGALIFSGAVILLEFIPEIAIPVLGTFALVSYIANKVLTVQTIDNALSKRNEKWD |
| | | EVYKYIVTNWLAKVNTQIDLIRKKMKETLENQAEATKAIINYQYNQYTEEEK |
| | | NNINFNIDDLSSKLNESINKAMININKFLNQCSVSYLMNSMIPYGVKRLEDF |
| | | DASLKDALLKYIYDNRGTLIGQVDRLKDKVNNTLSTDIPFQLSKYVDNQRLLS |
| | | TFTEYIKNIINTSILNLRYESNHLIDLSRYASKINIGSKVNFDPIDKNQIQLFNLE |
| | | SSKIEVILKNAIVYNSMYENFSTSFWIRIPKYFNSISLNNEYTIINCMENNSGW |
| | | KVSLNYGEIIWTLQDTQEIKQRVVFKYSQMINISDYINRWIFVTITNNRLNNS |
| | | KIYINGRLIDQKPISNLGNIHASNNIMFKLDGCRDTHRYIWIKYFNLFDKELN |
| | | EKEIKDLYDNQSNSGILKDFWGDYLQYDKPYYMLNLYDPNKYVDVNNVGI |
| | | RGYMYLKGPRGSVMTTNIYLNSSLYRGTKFIIKKYASGNKDNIVRNNDRVYI |
| | | NVVVKNKEYRLATNASQAGVEKILSALEIPDVGNLSQVVVMKSKNDQGITN |
| | | KCKMNLQDNNGNDIGFIGFHQFNNIAKLVASNWYNRQIERSSRTLGCSW |
| | | EFIPVDDGWGERPLSINDSKILSLQNKKNALVDTSGYNAEVRVGDNVQLNT |
| | | IYTNDFKLSSSGDKIIVNLNNNILYSAIYENSSVSFWIKISKDLTNSHNEYTIINS |
| | | IEQNSGWKLCIRNGNIEWILQDVNRKYKSLIFDYSESLSHTGYTNKWFFVTIT |
| | | NNIMGYMKLYINGELKQSQKIEDLDEVKLDKTIVFGIDENIDENQMLWIRD |
| | | FNIFSKELSNEDINIVYEGQILRNVIKDYWGNPLKFDTEYYIINDNYIDRYIAPE |
| | | SNVLVLVQYPDRSKLYTGNPITIKSVSDKNPYSRILNGDNIILHMLYNSRKYM |
| | | IIRDTDTIYATQGGECSQNCVYALKLQSNLGNYGIGIFSIKNIVSKNKYCSQIF |
| | | SSFRENTMLLADIYKPWRFSFKNAYTPVAVTNYETKLLSTSSFWKFISRDPG |
| | | WVE |
| 190 | LC-Hn BoNT/A1 - H_{C}- | SLDKGYNKALNDLCIKVNNWDLFFSPSEDNFTNDLNKGEEITSDTNIEAAEE |
| | BoNT/E | NISLDLIQQYYLTFNFDNEPENISIENLSSDIIGQLELMPNIERFPNGKKYELDK |
| | | YTMFHYLRAQEFEHGKSRIALTNSVNEALLNPSRVYTFFSSDYVKKVNKATE |
| | | AAMFLGWVEQLVYDFTDETSEVSTTDKIADITIIIPYIGPALNIGNMLYKDDF |
| | | VGALIFSGAVILLEFIPEIAIPVLGTFALVSYIANKVLTVQTIDNALSKRNEKWD |
| | | EVYKYIVTNWLAKVNTQIDLIRKKMKETLENQAEATKAIINYQYNQYTEEEK |
| | | NNINFNIDDLSSKLNESINKAMININKFLNQCSVSYLMNSMIPYGVKRLEDF |
| | | DASLKDALLKYIYDNRGTLIGQVDRLKDKVNNTLSTDIPFQLSKYVDNQRLLS |
| | | TFTEYIKNIINTSILNLRYESNHLIDLSRYASKINIGSKVNFDPIDKNQIQLFNLE |
| | | SSKIEVILKNAIVYNSMYENFSTSFWIRIPKYFNSISLNNEYTIINCMENNSGW |
| | | KVSLNYGEIIWTLQDTQEIKQRVVFKYSQMINISDYINRWIFVTITNNRLNNS |
| | | KIYINGRLIDQKPISNLGNIHASNNIMFKLDGCRDTHRYIWIKYFNLFDKELN |
| | | EKEIKDLYDNQSNSGILKDFWGDYLQYDKPYYMLNLYDPNKYVDVNNVGI |
| | | RGYMYLKGPRGSVMTTNIYLNSSLYRGTKFIIKKYASGNKDNIVRNNDRVYI |
| | | NVVVKNKEYRLATNASQAGVEKILSALEIPDVGNLSQVVVMKSKNDQGITN |
| | | KCKMNLQDNNGNDIGFIGFHQFNNIAKLVASNWYNRQIERSSRTLGCSW |
| | | EFIPVDDGWGERPLKRIKSSSVLNMRYKNDKYVDTSGYDSNININGDVYKY |
| | | PTNKNQFGIYNDKLSEVNISQNDYIIYDNKYKNFSISFWVRIPNYDNKIVNV |
| | | NNEYTIINCMRDNNSGWKVSLNHNEIIWTLQDNAGINQKLAFNYGNANG |
| | | ISDYINKWIFVTITNDRLGDSKLYINGNLIDQKSILNLGNIHVSDNILFKIVNCS |
| | | YTRYIGIRYFNIFDKELDETEIQTLYSNEPNTNILKDFWGNYLLYDKEYYLLNV |
| | | LKPNNFIDRRKDSTLSINNIRSTILLANRLYSGIKVKIQRVNNSSTNDNLVRKN |
| | | DQVYINFVASKTHLFPLYADTATTNKEKTIKISSSGNRFNQVVVMNSVGNN |
| | | CTMNFKNNNGNNIGLLGFKADTVVASTWYYTHMRDHTNSNGCFWNFIS |
| | | EEHGWQEK |
| 191 | LC-Hn BoNT/A1 - H_{C}- | SLDKGYNKALNDLCIKVNNWDLFFSPSEDNFTNDLNKGEEITSDTNIEAAEE |
| | BoNT/F | NISLDLIQQYYLTFNFDNEPENISIENLSSDIIGQLELMPNIERFPNGKKYELDK |
| | | YTMFHYLRAQEFEHGKSRIALTNSVNEALLNPSRVYTFFSSDYVKKVNKATE |
| | | AAMFLGWVEQLVYDFTDETSEVSTTDKIADITIIIPYIGPALNIGNMLYKDDF |
| | | VGALIFSGAVILLEFIPEIAIPVLGTFALVSYIANKVLTVQTIDNALSKRNEKWD |
| | | EVYKYIVTNWLAKVNTQIDLIRKKMKETLENQAEATKAIINYQYNQYTEEEK |
| | | NNINFNIDDLSSKLNESINKAMININKFLNQCSVSYLMNSMIPYGVKRLEDF |
| | | DASLKDALLKYIYDNRGTLIGQVDRLKDKVNNTLSTDIPFQLSKYVDNQRLLS |
| | | TFTEYIKNIINTSILNLRYESNHLIDLSRYASKINIGSKVNFDPIDKNQIQLFNLE |
| | | SSKIEVILKNAIVYNSMYENFSTSFWIRIPKYFNSISLNNEYTIINCMENNSGW |
| | | KVSLNYGEIIWTLQDTQEIKQRVVFKYSQMINISDYINRWIFVTITNNRLNNS |
| | | KIYINGRLIDQKPISNLGNIHASNNIMFKLDGCRDTHRYIWIKYFNLFDKELN |
| | | EKEIKDLYDNQSNSGILKDFWGDYLQYDKPYYMLNLYDPNKYVDVNNVGI |
| | | RGYMYLKGPRGSVMTTNIYLNSSLYRGTKFIIKKYASGNKDNIVRNNDRVYI |
| | | NVVVKNKEYRLATNASQAGVEKILSALEIPDVGNLSQVVVMKSKNDQGITN |
| | | KCKMNLQDNNGNDIGFIGFHQFNNIAKLVASNWYNRQIERSSRTLGCSW |
| | | EFIPVDDGWGERPLKKIKDNSILDMRYENNKFIDISGYGSNISINGDVYIYST |
| | | NRNQFGIYSSKPSEVNIAQNNDIIYNGRYQNFSISFWVRIPKYFNKVNLNNE |
| | | YTIIDCIRNNNSGWKISLNYNKIIWTLQDTAGNNQKLVFNYTQMISISDYIN |
| | | KWIFVTITNNRLGNSRIYINGNLIDEKSISNLGDIHVSDNILFKIVGCNDTRYV |
| | | GIRYFKVFDTELGKTEIETLYSDEPDPSILKDFWGNYLLYNKRYYLLNLLRTDK |
| | | SITQNSNFLNINQQRGVYQKPNIFSNTRLYTGVEVIIRKNGSTDISNTDNFVR |
| | | KNDLAYINVVDRDVEYRLYADISIAKPEKIIKLIRTSNSNNSLGQIIVMDSIGN |
| | | NCTMNFQNNNGGNIGLLGFHSNNLVASSWYYNNIRKNTSSNGCFWSFIS |
| | | KEHGWQEN |
| 192 | LC-Hn BoNT/A1 - H_{C}- | SLDKGYNKALNDLCIKVNNWDLFFSPSEDNFTNDLNKGEEITSDTNIEAAEE |
| | BoNT/G | NISLDLIQQYYLTFNFDNEPENISIENLSSDIIGQLELMPNIERFPNGKKYELDK |
| | | YTMFHYLRAQEFEHGKSRIALTNSVNEALLNPSRVYTFFSSDYVKKVNKATE |
| | | AAMFLGWVEQLVYDFTDETSEVSTTDKIADITIIIPYIGPALNIGNMLYKDDF |
| | | VGALIFSGAVILLEFIPEIAIPVLGTFALVSYIANKVLTVQTIDNALSKRNEKWD |
| | | EVYKYIVTNWLAKVNTQIDLIRKKMKETLENQAEATKAIINYQYNQYTEEEK |
| | | NNINFNIDDLSSKLNESINKAMININKFLNQCSVSYLMNSMIPYGVKRLEDF |
| | | DASLKDALLKYIYDNRGTLIGQVDRLKDKVNNTLSTDIPFQLSKYVDNQRLLS |
| | | TFTEYIKNIINTSILNLRYESNHLIDLSRYASKINIGSKVNFDPIDKNQIQLFNLE |
| | | SSKIEVILKNAIVYNSMYENFSTSFWIRIPKYFNSISLNNEYTIINCMENNSGW |
| | | KVSLNYGEIIWTLQDTQEIKQRVVFKYSQMINISDYINRWIFVTITNNRLNNS |
| | | KIYINGRLIDQKPISNLGNIHASNNIMFKLDGCRDTHRYIWIKYFNLFDKELN |
| | | EKEIKDLYDNQSNSGILKDFWGDYLQYDKPYYMLNLYDPNKYVDVNNVGI |
| | | RGYMYLKGPRGSVMTTNIYLNSSLYRGTKFIIKKYASGNKDNIVRNNDRVYI |
| | | NVVVKNKEYRLATNASQAGVEKILSALEIPDVGNLSQVVVMKSKNDQGITN |
| | | KCKMNLQDNNGNDIGFIGFHQFNNIAKLVASNWYNRQIERSSRTLGCSW |
| | | EFIPVDDGWGERPLSNISSNAILSLSYRGGRLIDSSGYGATMNVGSDVIFNDI |
| | | GNGQFKLNNSENSNITAHQSKFVVYDSMFDNFSINFWVRTPKYNNNDIQT |
| | | YLQNEYTIISCIKNDSGWKVSIKGNRIIWTLIDVNAKSKSIFFEYSIKDNISDYI |
| | | NKWFSITITNDRLG |
| | | NANIYINGSLKKSEKILNLDRINSSNDIDFKLINCTDTTKFVWIKDFNIFGREL |
| | | NATEVSSLYWIQSSTNTLKDFWGNPLRYDTQYYLFNQGMQNIYIKYFSKAS |
| | | MGETAPRTNFNNAAINYQNLYLGLRFIIKKASNSRNINNDNIVREGDYIYLNI |
| | | DNISDESYRVYVLVNSKEIQTQLFLAPINDDPTFYDVLQIKKYYEKTTYNCQIL |
| | | CEKDTKTFGLFGIGKFVKDYGYVWDTYDNYFCISQWYLRRISENINKLRLGC |
| | | NWQFIPVDEGWTE |
| 193 | LC-Hn BoNT/A1 - H_{C}- | SLDKGYNKALNDLCIKVNNWDLFFSPSEDNFTNDLNKGEEITSDTNIEAAEE |
| | BoNT/H | NISLDLIQQYYLTFNFDNEPENISIENLSSDIIGQLELMPNIERFPNGKKYELDK |
| | | YTMFHYLRAQEFEHGKSRIALTNSVNEALLNPSRVYTFFSSDYVKKVNKATE |
| | | AAMFLGWVEQLVYDFTDETSEVSTTDKIADITIIIPYIGPALNIGNMLYKDDF |
| | | VGALIFSGAVILLEFIPEIAIPVLGTFALVSYIANKVLTVQTIDNALSKRNEKWD |
| | | EVYKYIVTNWLAKVNTQIDLIRKKMKETLENQAEATKAIINYQYNQYTEEEK |
| | | NNINFNIDDLSSKLNESINKAMININKFLNQCSVSYLMNSMIPYGVKRLEDF |
| | | DASLKDALLKYIYDNRGTLIGQVDRLKDKVNNTLSTDIPFQLSKYVDNQRLLS |
| | | TFTEYIKNIINTSILNLRYESNHLIDLSRYASKINIGSKVNFDPIDKNQIQLFNLE |
| | | SSKIEVILKNAIVYNSMYENFSTSFWIRIPKYFNSISLNNEYTIINCMENNSGW |
| | | KVSLNYGEIIWTLQDTQEIKQRVVFKYSQMINISDYINRWIFVTITNNRLNNS |
| | | KIYINGRLIDQKPISNLGNIHASNNIMFKLDGCRDTHRYIWIKYFNLFDKELN |
| | | EKEIKDLYDNQSNSGILKDFWGDYLQYDKPYYMLNLYDPNKYVDVNNVGI |
| | | RGYMYLKGPRGSVMTTNIYLNSSLYRGTKFIIKKYASGNKDNIVRNNDRVYI |
| | | NVVVKNKEYRLATNASQAGVEKILSALEIPDVGNLSQVVVMKSKNDQGITN |
| | | KCKMNLQDNNGNDIGFIGFHQFNNIAKLVASNWYNRQIERSSRTLGCSW |
| | | EFIPVDDGWGERPLGELKYNCILNIKYEMDRDKLVDSSGYRSRINIGTGVKF |
| | | SEIDKNQVQLSNLESSKIEVILNNGVIYNSMYENFSTSFWIRIPKYFRNINNEY |
| | | KIISCMQNNSGWEVSLNFSNMNSKIIWTLQDTEGIKKTVVFQYTQNINISD |
| | | YINRWIFVTITNNRLSNSKIYINGRLINEESISDLGNIHASNNIMFKLDGCRDP |
| | | HRYIWIKYFNLFDKELNKKEIKDLYDNQSNSGILKDFWGDYLQYDKPYYML |
| | | NLYDPNKYLDVNNVGIRGYMYLKGPRGRIVTTNIYLNSTLYMGTKFIIKKYA |
| | | SGNKDNIVRNNDRVYINVVVKNKEYRLATNASQAGVEKILSAVEIPDVGNL |
| | | SQVVVMKSENDQGIRNKCKMNLQDNNGNDIGFIGFHQFNNIAKLVASN |
| | | WYNRQIGKASRTFGCSWEFIPVDDGWGESSL |
| 194 | LC-Hn BoNT/A1 - H_{C}- | SLDKGYNKALNDLCIKVNNWDLFFSPSEDNFTNDLNKGEEITSDTNIEAAEE |
| | BoNT/EN | NISLDLIQQYYLTFNFDNEPENISIENLSSDIIGQLELMPNIERFPNGKKYELDK |
| | | YTMFHYLRAQEFEHGKSRIALTNSVNEALLNPSRVYTFFSSDYVKKVNKATE |
| | | AAMFLGWVEQLVYDFTDETSEVSTTDKIADITIIIPYIGPALNIGNMLYKDDF |
| | | VGALIFSGAVILLEFIPEIAIPVLGTFALVSYIANKVLTVQTIDNALSKRNEKWD |
| | | EVYKYIVTNWLAKVNTQIDLIRKKMKETLENQAEATKAIINYQYNQYTEEEK |
| | | NNINFNIDDLSSKLNESINKAMININKFLNQCSVSYLMNSMIPYGVKRLEDF |
| | | DASLKDALLKYIYDNRGTLIGQVDRLKDKVNNTLSTDIPFQLSKYVDNQRLLS |
| | | TFTEYIKNIINTSILNLRYESNHLIDLSRYASKINIGSKVNFDPIDKNQIQLFNLE |
| | | SSKIEVILKNAIVYNSMYENFSTSFWIRIPKYFNSISLNNEYTIINCMENNSGW |
| | | KVSLNYGEIIWTLQDTQEIKQRVVFKYSQMINISDYINRWIFVTITNNRLNNS |
| | | KIYINGRLIDQKPISNLGNIHASNNIMFKLDGCRDTHRYIWIKYFNLFDKELN |
| | | EKEIKDLYDNQSNSGILKDFWGDYLQYDKPYYMLNLYDPNKYVDVNNVGI |
| | | RGYMYLKGPRGSVMTTNIYLNSSLYRGTKFIIKKYASGNKDNIVRNNDRVYI |
| | | NVVVKNKEYRLATNASQAGVEKILSALEIPDVGNLSQVVVMKSKNDQGITN |
| | | KCKMNLQDNNGNDIGFIGFHQFNNIAKLVASNWYNRQIERSSRTLGCSW |
| | | EFIPVDDGWGERPLGKIQDLSGENTPLTLGENLHIVNGRDNQAVRLNNQL |
| | | DSKLEIQSRPNIHFTAFEDFSISIWIRCSMLRNNRNRGQKYTIIQQFNKYGW |
| | | QLAIQDSVFVWTLHDTFNNQIQLTSGSALTNKNYLLQNFWLHITVTNKRSE |
| | | KSRLYINGVLQDQKDISVLGNCHPKEPILFSIQDNSDPNYFVRFEQFNVYRK |
| | | ALTDSEVNRLYWKYFEGSYLRDVWGERLTYNRDYYMQLSTLPGRGIKREYR |
| | | TWSGFDYIILSELGTQKIPTHEVTYPKLYQGQKITIHSDGKNLEPHVKSNKNI |
| | | RLKIDDFYIGVVNPFKLPEWRPESGAYVVTTYNHAEDLCLYFRTRSSSQSLYY |
| | | GQLIMNDGRNKSLLNYTLKGSTYWIWSSAWYYENYNTSSKTAGNWYFIPV |
| | | DEGWKED |
| 195 | LC-Hn BoNT/A2 - H_{C}- | IVNTSILSIVYKKDDLIDLSRYGAKINIGDRVYYDSIDKNQIKLINLESSTIEVILK |
| | BoNT/B | NAIVYNSMYENFSTSFWIKIPKYFSKINLNNEYTIINCIENNSGWKVSLNYGEI |
| | | IWTLQDNKQNIQRVVFKYSQMVNISDYINRWIFVTITNNRLTKSKIYINGRLI |
| | | DQKPISNLGNIHASNKIMFKLDGCRDPRRYIMIKYFNLFDKELNEKEIKDLYD |
| | | SQSNSGILKDFWGNYLQYDKPYYMLNLFDPNKYVDVNNIGIRGYMYLKGP |
| | | RGSVVTTNIYLNSTLYEGTKFIIKKYASGNEDNIVRNNDRVYINVVVKNKEYR |
| | | LATNASQAGVEKILSALEIPDVGNLSQVVVMKSKDDQGIRNKCKMNLQDN |
| | | NGNDIGFIGFHLYDNIAKLVASNWYNRQVGKASRTFGCSWEFIPVDDGW |
| | | GESSLSLDEGYNKALNDLCIKVNNWDLFFSPSEDNFTNDLDKVEEITADTNI |
| | | EAAEENISLDLIQQYYLTFDFDNEPENISIENLSSDIIGQLEPMPNIERFPNGK |
| | | KYELDKYTMFHYLRAQEFEHGDSRIILTNSAEEALLKPNVAYTFFSSKYVKKI |
| | | NKAVEAFMFLNWAEELVYDFTDETNEVTTMDKIADITIIVPYIGPALNIGN |
| | | MLSKGEFVEAIIFTGVVAMLEFIPEYALPVFGTFAIVSYIANKVLTVQTINNAL |
| | | SKRNEKWDEVYKYTVTNWLAKVNTQIDLIREKMKKALENQAEATKAIINYQ |
| | | YNQYTEEEKNNINFNIDDLSSKLNESINSAMININKFLDQCSVSYLMNSMIP |
| | | YAVKRLKDFDASVRDVLLKYIYDNRGTLVLQVDRLKDEVNNTLSADIPFQLS |
| | | KYVDNKKLLSTFTEYIKNSEILNNIILNLRYRDNNLIDLSGYGAKVEVYDGVKL |
| | | NDKNQFKLTSSADSKIRVTQNQNIIFNSMFLDFSVSFWIRIPKYRNDDIQNYI |
| | | HNEYTIINCMKNNSGWKISIRGNRIIWTLIDINGKTKSVFFEYNIREDISEYIN |
| | | RWFFVTITNNLDNAKIYINGTLESNMDIKDIGEVIVNGEITFKLDGDVDRTQ |
| | | FIWMKYFSIFNTQLNQSNIKEIYKIQSYSEYLKDFWGNPLMYNKEYYMFNA |
| | | GNKNSYIKLVKDSSVGEILIRSKYNQNSNYINYRNLYIGEKFIIRRESNSQSIND |
| | | DIVRKEDYIHLDLVLHHEEWRVYAYKYFKEQEEKLFLSIISDSNEFYKTIEIKEY |
| | | DEQPSYSCQLLFKKDEESTDDIGLIGIHRFYESGVLRKKYKDYFCISKWYLKEV |
| | | KRKPYKSNLGCNWQFIPKDEGWTE |
| 196 | LC-Hn BoNT/A2 - H_{C} | IVNTSILSIVYKKDDLIDLSRYGAKINIGDRVYYDSIDKNQIKLINLESSTIEVILK |
| | BoNT/C | NAIVYNSMYENFSTSFWIKIPKYFSKINLNNEYTIINCIENNSGWKVSLNYGEI |
| | | IWTLQDNKQNIQRVVFKYSQMVNISDYINRWIFVTITNNRLTKSKIYINGRLI |
| | | DQKPISNLGNIHASNKIMFKLDGCRDPRRYIMIKYFNLFDKELNEKEIKDLYD |
| | | SQSNSGILKDFWGNYLQYDKPYYMLNLFDPNKYVDVNNIGIRGYMYLKGP |
| | | RGSVVTTNIYLNSTLYEGTKFIIKKYASGNEDNIVRNNDRVYINVVVKNKEYR |
| | | LATNASQAGVEKILSALEIPDVGNLSQVVVMKSKDDQGIRNKCKMNLQDN |
| | | NGNDIGFIGFHLYDNIAKLVASNWYNRQVGKASRTFGCSWEFIPVDDGW |
| | | GESSLSLDEGYNKALNDLCIKVNNWDLFFSPSEDNFTNDLDKVEEITADTNI |
| | | EAAEENISLDLIQQYYLTFDFDNEPENISIENLSSDIIGQLEPMPNIERFPNGK |
| | | KYELDKYTMFHYLRAQEFEHGDSRIILTNSAEEALLKPNVAYTFFSSKYVKKI |
| | | NKAVEAFMFLNWAEELVYDFTDETNEVTTMDKIADITIIVPYIGPALNIGN |
| | | MLSKGEFVEAIIFTGVVAMLEFIPEYALPVFGTFAIVSYIANKVLTVQTINNAL |
| | | SKRNEKWDEVYKYTVTNWLAKVNTQIDLIREKMKKALENQAEATKAIINYQ |
| | | YNQYTEEEKNNINFNIDDLSSKLNESINSAMININKFLDQCSVSYLMNSMIP |
| | | YAVKRLKDFDASVRDVLLKYIYDNRGTLVLQVDRLKDEVNNTLSADIPFQLS |
| | | KYVDNKKLLSTFTEYIKNSKILSLQNRKNTLVDTSGYNAEVSEEGDVQLNPIF |
| | | PFDFKLGSSGEDRGKVIVTQNENIVYNSMYESFSISFWIRINKWVSNLPGYTI |
| | | IDSVKNNSGWSIGIISNFLVFTLKQNEDSEQSINFSYDISNNAPGYNKWFFV |
| | | TVTNNMMGNMKIYINGKLIDTIKVKELTGINFSKTITFEINKIPDTGLITSDSD |
| | | NINMWIRDFYIFAKELDGKDINILFNSLQYTNVVKDYWGNDLRYNKEYYM |
| | | VNIDYLNRYMYANSRQIVFNTRRNNNDFNEGYKIIIKRIRGNTNDTRVRGG |
| | | DILYFDMTINNKAYNLFMKNETMYADNHSTEDIYAIGLREQTKDINDNIIFQ |
| | | IQPMNNTYYYASQIFKSNFNGENISGICSIGTYRFRLGGDWYRHNYLVPTVK |
| | | QGNYASLLESTSTHWGFVPVSE |
| 197 | LC-Hn BoNT/A2 - H_{C}- | IVNTSILSIVYKKDDLIDLSRYGAKINIGDRVYYDSIDKNQIKLINLESSTIEVILK |
| | BoNT/D | NAIVYNSMYENFSTSFWIKIPKYFSKINLNNEYTIINCIENNSGWKVSLNYGEI |
| | | IWTLQDNKQNIQRVVFKYSQMVNISDYINRWIFVTITNNRLTKSKIYINGRLI |
| | | DQKPISNLGNIHASNKIMFKLDGCRDPRRYIMIKYFNLFDKELNEKEIKDLYD |
| | | SQSNSGILKDFWGNYLQYDKPYYMLNLFDPNKYVDVNNIGIRGYMYLKGP |
| | | RGSVVTTNIYLNSTLYEGTKFIIKKYASGNEDNIVRNNDRVYINVVVKNKEYR |
| | | LATNASQAGVEKILSALEIPDVGNLSQVVVMKSKDDQGIRNKCKMNLQDN |
| | | NGNDIGFIGFHLYDNIAKLVASNWYNRQVGKASRTFGCSWEFIPVDDGW |
| | | GESSLSLDEGYNKALNDLCIKVNNWDLFFSPSEDNFTNDLDKVEEITADTNI |
| | | EAAEENISLDLIQQYYLTFDFDNEPENISIENLSSDIIGQLEPMPNIERFPNGK |
| | | KYELDKYTMFHYLRAQEFEHGDSRIILTNSAEEALLKPNVAYTFFSSKYVKKI |
| | | NKAVEAFMFLNWAEELVYDFTDETNEVTTMDKIADITIIVPYIGPALNIGN |
| | | MLSKGEFVEAIIFTGVVAMLEFIPEYALPVFGTFAIVSYIANKVLTVQTINNAL |
| | | SKRNEKWDEVYKYTVTNWLAKVNTQIDLIREKMKKALENQAEATKAIINYQ |
| | | YNQYTEEEKNNINFNIDDLSSKLNESINSAMININKFLDQCSVSYLMNSMIP |
| | | YAVKRLKDFDASVRDVLLKYIYDNRGTLVLQVDRLKDEVNNTLSADIPFQLS |
| | | KYVDNKKLLSTFTEYIKNSINDSKILSLQNKKNALVDTSGYNAEVRVGDNVQ |
| | | LNTIYTNDFKLSSSGDKIIVNLNNNILYSAIYENSSVSFWIKISKDLTNSHNEYT |
| | | IINSIEQNSGWKLCIRNGNIEWILQDVNRKYKSLIFDYSESLSHTGYTNKWFF |
| | | VTITNNIMGYMKLYINGELKQSQKIEDLDEVKLDKTIVFGIDENIDENQML |
| | | WIRDFNIFSKELSNEDINIVYEGQILRNVIKDYWGNPLKFDTEYYIINDNYIDR |
| | | YIAPESNVLVLVQYPDRSKLYTGNPITIKSVSDKNPYSRILNGDNIILHMLYNS |
| | | RKYMIIRDTDTIYATQGGECSQNCVYALKLQSNLGNYGIGIFSIKNIVSKNKY |
| | | CSQIFSSFRENTMLLADIYKPWRFSFKNAYTPVAVTNYETKLLSTSSFWKFIS |
| | | RDPGWVE |
| 198 | LC-Hn BoNT/A2 - H_{C}- | IVNTSILSIVYKKDDLIDLSRYGAKINIGDRVYYDSIDKNQIKLINLESSTIEVILK |
| | BoNT/E | NAIVYNSMYENFSTSFWIKIPKYFSKINLNNEYTIINCIENNSGWKVSLNYGEI |
| | | IWTLQDNKQNIQRVVFKYSQMVNISDYINRWIFVTITNNRLTKSKIYINGRLI |
| | | DQKPISNLGNIHASNKIMFKLDGCRDPRRYIMIKYFNLFDKELNEKEIKDLYD |
| | | SQSNSGILKDFWGNYLQYDKPYYMLNLFDPNKYVDVNNIGIRGYMYLKGP |
| | | RGSVVTTNIYLNSTLYEGTKFIIKKYASGNEDNIVRNNDRVYINVVVKNKEYR |
| | | LATNASQAGVEKILSALEIPDVGNLSQVVVMKSKDDQGIRNKCKMNLQDN |
| | | NGNDIGFIGFHLYDNIAKLVASNWYNRQVGKASRTFGCSWEFIPVDDGW |
| | | GESSLSLDEGYNKALNDLCIKVNNWDLFFSPSEDNFTNDLDKVEEITADTNI |
| | | EAAEENISLDLIQQYYLTFDFDNEPENISIENLSSDIIGQLEPMPNIERFPNGK |
| | | KYELDKYTMFHYLRAQEFEHGDSRIILTNSAEEALLKPNVAYTFFSSKYVKKI |
| | | NKAVEAFMFLNWAEELVYDFTDETNEVTTMDKIADITIIVPYIGPALNIGN |
| | | MLSKGEFVEAIIFTGVVAMLEFIPEYALPVFGTFAIVSYIANKVLTVQTINNAL |
| | | SKRNEKWDEVYKYTVTNWLAKVNTQIDLIREKMKKALENQAEATKAIINYQ |
| | | YNQYTEEEKNNINFNIDDLSSKLNESINSAMININKFLDQCSVSYLMNSMIP |
| | | YAVKRLKDFDASVRDVLLKYIYDNRGTLVLQVDRLKDEVNNTLSADIPFQLS |
| | | KYVDNKKLLSTFTEYIKNKRIKSSSVLNMRYKNDKYVDTSGYDSNININGDVY |
| | | KYPTNKNQFGIYNDKLSEVNISQNDYIIYDNKYKNFSISFWVRIPNYDNKIVN |
| | | VNNEYTIINCMRDNNSGWKVSLNHNEIIWTLQDNAGINQKLAFNYGNAN |
| | | GISDYINKWIFVTITNDRLGDSKLYINGNLIDQKSILNLGNIHVSDNILFKIVNC |
| | | SYTRYIGIRYFNIFDKELDETEIQTLYSNEPNTNILKDFWGNYLLYDKEYYLLN |
| | | VLKPNNFIDRRKDSTLSINNIRSTILLANRLYSGIKVKIQRVNNSSTNDNLVRK |
| | | NDQVYINFVASKTHLFPLYADTATTNKEKTIKISSSGNRFNQVVVMNSVGN |
| | | NCTMNFKNNNGNNIGLLGFKADTVVASTWYYTHMRDHTNSNGCFWNFI |
| | | SEEHGWQEK |
| 199 | LC-Hn BoNT/A2 - H_{C}- | IVNTSILSIVYKKDDLIDLSRYGAKINIGDRVYYDSIDKNQIKLINLESSTIEVILK |
| | BoNT/F | NAIVYNSMYENFSTSFWIKIPKYFSKINLNNEYTIINCIENNSGWKVSLNYGEI |
| | | IWTLQDNKQNIQRVVFKYSQMVNISDYINRWIFVTITNNRLTKSKIYINGRLI |
| | | DQKPISNLGNIHASNKIMFKLDGCRDPRRYIMIKYFNLFDKELNEKEIKDLYD |
| | | SQSNSGILKDFWGNYLQYDKPYYMLNLFDPNKYVDVNNIGIRGYMYLKGP |
| | | RGSVVTTNIYLNSTLYEGTKFIIKKYASGNEDNIVRNNDRVYINVVVKNKEYR |
| | | LATNASQAGVEKILSALEIPDVGNLSQVVVMKSKDDQGIRNKCKMNLQDN |
| | | NGNDIGFIGFHLYDNIAKLVASNWYNRQVGKASRTFGCSWEFIPVDDGW |
| | | GESSLSLDEGYNKALNDLCIKVNNWDLFFSPSEDNFTNDLDKVEEITADTNI |
| | | EAAEENISLDLIQQYYLTFDFDNEPENISIENLSSDIIGQLEPMPNIERFPNGK |
| | | KYELDKYTMFHYLRAQEFEHGDSRIILTNSAEEALLKPNVAYTFFSSKYVKKI |
| | | NKAVEAFMFLNWAEELVYDFTDETNEVTTMDKIADITIIVPYIGPALNIGN |
| | | MLSKGEFVEAIIFTGVVAMLEFIPEYALPVFGTFAIVSYIANKVLTVQTINNAL |
| | | SKRNEKWDEVYKYTVTNWLAKVNTQIDLIREKMKKALENQAEATKAIINYQ |
| | | YNQYTEEEKNNINFNIDDLSSKLNESINSAMININKFLDQCSVSYLMNSMIP |
| | | YAVKRLKDFDASVRDVLLKYIYDNRGTLVLQVDRLKDEVNNTLSADIPFQLS |
| | | KYVDNKKLLSTFTEYIKNKKIKDNSILDMRYENNKFIDISGYGSNISINGDVYIY |
| | | STNRNQFGIYSSKPSEVNIAQNNDIIYNGRYQNFSISFWVRIPKYFNKVNLN |
| | | NEYTIIDCIRNNNSGWKISLNYNKIIWTLQDTAGNNQKLVFNYTQMISISDYI |
| | | NKWIFVTITNNRLGNSRIYINGNLIDEKSISNLGDIHVSDNILFKIVGCNDTRY |
| | | VGIRYFKVFDTELGKTEIETLYSDEPDPSILKDFWGNYLLYNKRYYLLNLLRTD |
| | | KSITQNSNFLNINQQRGVYQKPNIFSNTRLYTGVEVIIRKNGSTDISNTDNFV |
| | | RKNDLAYINVVDRDVEYRLYADISIAKPEKIIKLIRTSNSNNSLGQIIVMDSIG |
| | | NNCTMNFQNNNGGNIGLLGFHSNNLVASSWYYNNIRKNTSSNGCFWSFI |
| | | SKEHGWQEN |
| 200 | LC-Hn BoNT/A2 - H_{C}- | IVNTSILSIVYKKDDLIDLSRYGAKINIGDRVYYDSIDKNQIKLINLESSTIEVILK |
| | BoNT/G | NAIVYNSMYENFSTSFWIKIPKYFSKINLNNEYTIINCIENNSGWKVSLNYGEI |
| | | IWTLQDNKQNIQRVVFKYSQMVNISDYINRWIFVTITNNRLTKSKIYINGRLI |
| | | DQKPISNLGNIHASNKIMFKLDGCRDPRRYIMIKYFNLFDKELNEKEIKDLYD |
| | | SQSNSGILKDFWGNYLQYDKPYYMLNLFDPNKYVDVNNIGIRGYMYLKGP |
| | | RGSVVTTNIYLNSTLYEGTKFIIKKYASGNEDNIVRNNDRVYINVVVKNKEYR |
| | | LATNASQAGVEKILSALEIPDVGNLSQVVVMKSKDDQGIRNKCKMNLQDN |
| | | NGNDIGFIGFHLYDNIAKLVASNWYNRQVGKASRTFGCSWEFIPVDDGW |
| | | GESSLSLDEGYNKALNDLCIKVNNWDLFFSPSEDNFTNDLDKVEEITADTNI |
| | | EAAEENISLDLIQQYYLTFDFDNEPENISIENLSSDIIGQLEPMPNIERFPNGK |
| | | KYELDKYTMFHYLRAQEFEHGDSRIILTNSAEEALLKPNVAYTFFSSKYVKKI |
| | | NKAVEAFMFLNWAEELVYDFTDETNEVTTMDKIADITIIVPYIGPALNIGN |
| | | MLSKGEFVEAIIFTGVVAMLEFIPEYALPVFGTFAIVSYIANKVLTVQTINNAL |
| | | SKRNEKWDEVYKYTVTNWLAKVNTQIDLIREKMKKALENQAEATKAIINYQ |
| | | YNQYTEEEKNNINFNIDDLSSKLNESINSAMININKFLDQCSVSYLMNSMIP |
| | | YAVKRLKDFDASVRDVLLKYIYDNRGTLVLQVDRLKDEVNNTLSADIPFQLS |
| | | KYVDNKKLLSTFTEYIKNSNISSNAILSLSYRGGRLIDSSGYGATMNVGSDVIF |
| | | NDIGNGQFKLNNSENSNITAHQSKFVVYDSMFDNFSINFWVRTPKYNNN |
| | | DIQTYLQNEYTIISCIKNDSGWKVSIKGNRIIWTLIDVNAKSKSIFFEYSIKDNI |
| | | SDYINKWFSITITNDRLG |
| | | NANIYINGSLKKSEKILNLDRINSSNDIDFKLINCTDTTKFVWIKDFNIFGREL |
| | | NATEVSSLYWIQSSTNTLKDFWGNPLRYDTQYYLFNQGMQNIYIKYFSKAS |
| | | MGETAPRTNFNNAAINYQNLYLGLRFIIKKASNSRNINNDNIVREGDYIYLNI |
| | | DNISDESYRVYVLVNSKEIQTQLFLAPINDDPTFYDVLQIKKYYEKTTYNCQIL |
| | | CEKDTKTFGLFGIGKFVKDYGYVWDTYDNYFCISQWYLRRISENINKLRLGC |
| | | NWQFIPVDEGWTE |
| 201 | LC-Hn BoNT/A2 - H_{C}- | IVNTSILSIVYKKDDLIDLSRYGAKINIGDRVYYDSIDKNQIKLINLESSTIEVILK |
| | BoNT/H | NAIVYNSMYENFSTSFWIKIPKYFSKINLNNEYTIINCIENNSGWKVSLNYGEI |
| | | IWTLQDNKQNIQRVVFKYSQMVNISDYINRWIFVTITNNRLTKSKIYINGRLI |
| | | DQKPISNLGNIHASNKIMFKLDGCRDPRRYIMIKYFNLFDKELNEKEIKDLYD |
| | | SQSNSGILKDFWGNYLQYDKPYYMLNLFDPNKYVDVNNIGIRGYMYLKGP |
| | | RGSVVTTNIYLNSTLYEGTKFIIKKYASGNEDNIVRNNDRVYINVVVKNKEYR |
| | | LATNASQAGVEKILSALEIPDVGNLSQVVVMKSKDDQGIRNKCKMNLQDN |
| | | NGNDIGFIGFHLYDNIAKLVASNWYNRQVGKASRTFGCSWEFIPVDDGW |
| | | GESSLSLDEGYNKALNDLCIKVNNWDLFFSPSEDNFTNDLDKVEEITADTNI |
| | | EAAEENISLDLIQQYYLTFDFDNEPENISIENLSSDIIGQLEPMPNIERFPNGK |
| | | KYELDKYTMFHYLRAQEFEHGDSRIILTNSAEEALLKPNVAYTFFSSKYVKKI |
| | | NKAVEAFMFLNWAEELVYDFTDETNEVTTMDKIADITIIVPYIGPALNIGN |
| | | MLSKGEFVEAIIFTGVVAMLEFIPEYALPVFGTFAIVSYIANKVLTVQTINNAL |
| | | SKRNEKWDEVYKYTVTNWLAKVNTQIDLIREKMKKALENQAEATKAIINYQ |
| | | YNQYTEEEKNNINFNIDDLSSKLNESINSAMININKFLDQCSVSYLMNSMIP |
| | | YAVKRLKDFDASVRDVLLKYIYDNRGTLVLQVDRLKDEVNNTLSADIPFQLS |
| | | KYVDNKKLLSTFTEYIKNGELKYNCILNIKYEMDRDKLVDSSGYRSRINIGTGV |
| | | KFSEIDKNQVQLSNLE |
| | | SSKIEVILNNGVIYNSMYENFSTSFWIRIPKYFRNINNEYKIISCMQNNSGWE |
| | | VSLNFSNMNSKIIWTLQDTEGIKKTVVFQYTQNINISDYINRWIFVTITNNRL |
| | | SNSKIYINGRLINEESISDLGNIHASNNIMFKLDGCRDPHRYIWIKYFNLFDKE |
| | | LNKKEIKDLYDNQSNSGILKDFWGDYLQYDKPYYMLNLYDPNKYLDVNNV |
| | | GIRGYMYLKGPRGRIVTTNIYLNSTLYMGTKFIIKKYASGNKDNIVRNNDRV |
| | | YINVVVKNKEYRLATNASQAGVEKILSAVEIPDVGNLSQVVVMKSENDQGI |
| | | RNKCKMNLQDNNGNDIGFIGFHQFNNIAKLVASNWYNRQIGKASRTFGC |
| | | SWEFIPVDDGWGESSL |
| 202 | LC-Hn BoNT/A2 - H_{C}- | IVNTSILSIVYKKDDLIDLSRYGAKINIGDRVYYDSIDKNQIKLINLESSTIEVILK |
| | BoNT/EN | NAIVYNSMYENFSTSFWIKIPKYFSKINLNNEYTIINCIENNSGWKVSLNYGEI |
| | | IWTLQDNKQNIQRVVFKYSQMVNISDYINRWIFVTITNNRLTKSKIYINGRLI |
| | | DQKPISNLGNIHASNKIMFKLDGCRDPRRYIMIKYFNLFDKELNEKEIKDLYD |
| | | SQSNSGILKDFWGNYLQYDKPYYMLNLFDPNKYVDVNNIGIRGYMYLKGP |
| | | RGSVVTTNIYLNSTLYEGTKFIIKKYASGNEDNIVRNNDRVYINVVVKNKEYR |
| | | LATNASQAGVEKILSALEIPDVGNLSQVVVMKSKDDQGIRNKCKMNLQDN |
| | | NGNDIGFIGFHLYDNIAKLVASNWYNRQVGKASRTFGCSWEFIPVDDGW |
| | | GESSLSLDEGYNKALNDLCIKVNNWDLFFSPSEDNFTNDLDKVEEITADTNI |
| | | EAAEENISLDLIQQYYLTFDFDNEPENISIENLSSDIIGQLEPMPNIERFPNGK |
| | | KYELDKYTMFHYLRAQEFEHGDSRIILTNSAEEALLKPNVAYTFFSSKYVKKI |
| | | NKAVEAFMFLNWAEELVYDFTDETNEVTTMDKIADITIIVPYIGPALNIGN |
| | | MLSKGEFVEAIIFTGVVAMLEFIPEYALPVFGTFAIVSYIANKVLTVQTINNAL |
| | | SKRNEKWDEVYKYTVTNWLAKVNTQIDLIREKMKKALENQAEATKAIINYQ |
| | | YNQYTEEEKNNINFNIDDLSSKLNESINSAMININKFLDQCSVSYLMNSMIP |
| | | YAVKRLKDFDASVRDVLLKYIYDNRGTLVLQVDRLKDEVNNTLSADIPFQLS |
| | | KYVDNKKLLSTFTEYIKNGKIQDLSGENTPLTLGENLHIVNGRDNQAVRLNN |
| | | QLDSKLEIQSRPNIHFTAFEDFSISIWIRCSMLRNNRNRGQKYTIIQQFNKYG |
| | | WQLAIQDSVFVWTLHDTFNNQIQLTSGSALTNKNYLLQNFWLHITVTNKR |
| | | SEKSRLYINGVLQDQKDISVLGNCHPKEPILFSIQDNSDPNYFVRFEQFNVYR |
| | | KALTDSEVNRLYWKYFEGSYLRDVWGERLTYNRDYYMQLSTLPGRGIKREY |
| | | RTWSGFDYIILSELGTQKIPTHEVTYPKLYQGQKITIHSDGKNLEPHVKSNKN |
| | | IRLKIDDFYIGVVNPFKLPEWRPESGAYVVTTYNHAEDLCLYFRTRSSSQSLY |
| | | YGQLIMNDGRNKSLLNYTLKGSTYWIWSSAWYYENYNTSSKTAGNWYFIP |
| | | VDEGWKED |
| 203 | LC-H_{N} BoNT/A1 KR10 - | MPFVNKQFNYRDPVNGVDIAYIKIPNAGQMQPVKAFKIHNKIWVIPERDT |
| | H_{C}/B | FTNPEEGDLNPPPEAKQVPVSYYDSTYLSTDNEKDNYLKGVTKLFERIYSTDL |
| | | GRMLLTSIVRGIPFWGGSTIDTELKVIDTNCINVIQPDGSYRSEELNLVIIGPS |
| | | ADIIQFECKSFGHEVLNLTRNGYGSTQYIRFSPDFTFGFEESLEVDTNPLLGA |
| | | GKFATDPAVTLAHELIHAGHRLYGIAINPNRVFKVNTNAYYEMSGLEVSFEE |
| | | LRTFGGHDAKFIDSLQENEFRLYYYNRFRDIASTLNRAKSIVGTTASLQYMK |
| | | NVFKEKYLLSEDTSGKFSVDRLRFDKLYRMLTEIYTEDNFVKFFKVLNRKTYL |
| | | NFDKAVFRINIVPRVNYTIYDGFNLRNTNLAANFNGQNTEINNMNFTRLK |
| | | NFTGLFEFYKLLCVRGIITSKTKSLDKGYNKALNDLCIKVNNWDLFFSPSEDN |
| | | FTNDLNKGEEITSDTNIEAAEENISLDLIQQYYLTFNFDNEPENISIENLSSDII |
| | | GQLELMPNIERFPNGKKYELDKYTMFHYLRAQEFEHGKSRIALTNSVNEALL |
| | | NPSRVYTFFSSDYVKKVNKATEAAMFLGWVEQLVYDFTDETSEVSTTDKIA |
| | | DITIIIPYIGPALNIGNMLYKDDFVGALIFSGAVILLEFIPEIAIPVLGTFALVSYI |
| | | ANKVLTVQTIDNALSKRNEKWDEVYKYIVTNWLAKVNTQIDLIRKKMKETL |
| | | ENQAEATKAIINYQYNQYTEEEKNNINFNIDDLSSKLNESINKAMININKFLN |
| | | QCSVSYLMNSMIPYGVKRLEDFDASLKDALLKYIYDNRGTLIGQVDRLKDKV |
| | | NNTLSTDIPFQLSKYVDNQRLLSTFTEYIKNSEILNNIILNLRYRDNNLIDLSGY |
| | | GAKVEVYDGVKLNDKNQFKLTSSADSKIRVTQNQNIIFNSMFLDFSVSFWI |
| | | RIPKYRNDDIQNYIHNEYTIINCMKNNSGWKISIRGNRIIWTLIDINGKTKSV |
| | | FFEYNIREDISEYINRWFFVTITNNLDNAKIYINGTLESNMDIKDIGEVIVNGE |
| | | ITFKLDGDVDRTQFIWMKYFSIFNTQLNQSNIKEIYKIQSYSEYLKDFWGNPL |
| | | MYNKEYYMFNAGNKNSYIKLVKDSSVGEILIRSKYNQNSNYINYRNLYIGEK |
| | | FIIRRESNSQSINDDIVRKEDYIHLDLVLHHEEWRVYAYKYFKEQEEKLFLSIIS |
| | | DSNEFYKTIEIKEYDEQPSYSCQLLFKKDEESTDDIGLIGIHRFYESGVLRKKYK |
| | | DYFCISKWYLKEVKRKPYKSNLGCNWQFIPKDEGWTE |
| 204 | H_{C}-BoNT/A2-WT (of | IVNTSILSIVYKKDDLIDLSRYGAKINIGDRVYYDSIDKNQIKLINLESSTIEVILK |
| | full length) | NAIVYNSMYENFSTSFWIKIPKYFSKINLNNEYTIINCIENNSGWKVSLNYGEI |
| | | IWTLQDNKQNIQRVVFKYSQMVNISDYINRWIFVTITNNRLTKSKIYINGRLI |
| | | DQKPISNLGNIHASNKIMFKLDGCRDPRRYIMIKYFNLFDKELNEKEIKDLYD |
| | | SQSNSGILKDFWGNYLQYDKPYYMLNLFDPNKYVDVNNIGIRGYMYLKGP |
| | | RGSVVTTNIYLNSTLYEGTKFIIKKYASGNEDNIVRNNDRVYINVVVKNKEYR |
| | | LATNASQAGVEKILSALEIPDVGNLSQVVVMKSKDDQGIRNKCKMNLQDN |
| | | NGNDIGFIGFHLYDNIAKLVASNWYNRQVGKASRTFGCSWEFIPVDDGW |
| | | GESSL |
| 205 | H_{C}-BoNT/A1 (of full | IINTSILNLRYESNHLIDLSRYASKINIGSKVNFDPIDKNQIQLFNLESSKIEVILK |
| | length) | NAIVYNSMYENFSTSFWIRIPKYFNSISLNNEYTIINCMENNSGWKVSLNYG |
| | | EIIWTLQDTQEIKQRVVFKYSQMINISDYINRWIFVTITNNRLNNSKIYINGR |
| | | LIDQKPISNLGNIHASNNIMFKLDGCRDTHRYIWIKYFNLFDKELNEKEIKDL |
| | | YDNQSNSGILKDFWGDYLQYDKPYYMLNLYDPNKYVDVNNVGIRGYMYL |
| | | KGPRGSVMTTNIYLNSSLYRGTKFIIKKYASGNKDNIVRNNDRVYINVVVKN |
| | | KEYRLATNASQAGVEKILSALEIPDVGNLSQVVVMKSKNDQGITNKCKMNL |
| | | QDNNGNDIGFIGFHQFNNIAKLVASNWYNRQIERSSRTLGCSWEFIPVDD |
| | | GWGERPL |
| 206 | Thrombin Cleavage | LVPRGS |
| | site | |
| 207 | TEV cleavage site | ENLYFQG |
| 208 | PreScission cleavage | LEVLFQGP |
| | site | |
| 209 | Factor Xa cleavage | IEGR |
| | site 1 | |
| 210 | Factor Xa cleavage | IDGR |
| | site 2 | |
| 211 | Enterokinase cleavage | DDDDK |
| | site 1 | |
| 212 | SUMO protease | AHREQIGG |
| | cleavage site | |
| 213 | BoNT/A1-WT with a | MPFVNKQFNYKDPVNGVDIAYIKIPNAGQMQPVKAFKIHNKIWVIPERDT |
| | thrombin cleavage | FTNPEEGDLNPPPEAKQVPVSYYDSTYLSTDNEKDNYLKGVTKLFERIYSTDL |
| | site | GRMLLTSIVRGIPFWGGSTIDTELKVIDTNCINVIQPDGSYRSEELNLVIIGPS |
| | | ADIIQFECKSFGHEVLNLTRNGYGSTQYIRFSPDFTFGFEESLEVDTNPLLGA |
| | | GKFATDPAVTLAHELIHAGHRLYGIAINPNRVFKVNTNAYYEMSGLEVSFEE |
| | | LRTFGGHDAKFIDSLQENEFRLYYYNKFKDIASTLNKAKSIVGTTASLQYMK |
| | | NVFKEKYLLSEDTSGKFSVDKLKFDKLYKMLTEIYTEDNFVKFFKVLNRKTYL |
| | | NFDKAVFKINIVPKVNYTIYDGFNLRNTNLAANFNGQNTEINNMNFTKLKN |
| | | FTGLFEFYKLLCVRGIITSTSLVPRGSALNDLCIKVNNWDLFFSPSEDNFTND |
| | | LNKGEEITSDTNIEAAEENISLDLIQQYYLTFNFDNEPENISIENLSSDIIGQLEL |
| | | MPNIERFPNGKKYELDKYTMFHYLRAQEFEHGKSRIALTNSVNEALLNPSR |
| | | VYTFFSSDYVKKVNKATEAAMFLGWVEQLVYDFTDETSEVSTTDKIADITIII |
| | | PYIGPALNIGNMLYKDDFVGALIFSGAVILLEFIPEIAIPVLGTFALVSYIANKV |
| | | LTVQTIDNALSKRNEKWDEVYKYIVTNWLAKVNTQIDLIRKKMKEALENQA |
| | | EATKAIINYQYNQYTEEEKNNINFNIDDLSSKLNESINKAMININKFLNQCSV |
| | | SYLMNSMIPYGVKRLEDFDASLKDALLKYIYDNRGTLIGQVDRLKDKVNNTL |
| | | STDIPFQLSKYVDNQRLLSTFTEYIKNIINTSILNLRYESNHLIDLSRYASKINIG |
| | | SKVNFDPIDKNQIQLFNLESSKIEVILKNAIVYNSMYENFSTSFWIRIPKYFNSI |
| | | SLNNEYTIINCMENNSGWKVSLNYGEIIWTLQDTQEIKQRVVFKYSQMINIS |
| | | DYINRWIFVTITNNRLNNSKIYINGRLIDQKPISNLGNIHASNNIMFKLDGCR |
| | | DTHRYIWIKYFNLFDKELNEKEIKDLYDNQSNSGILKDFWGDYLQYDKPYY |
| | | MLNLYDPNKYVDVNNVGIRGYMYLKGPRGSVMTTNIYLNSSLYRGTKFIIK |
| | | KYASGNKDNIVRNNDRVYINVVVKNKEYRLATNASQAGVEKILSALEIPDV |
| | | GNLSQVVVMKSKNDQGITNKCKMNLQDNNGNDIGFIGFHQFNNIAKLVA |
| | | SNWYNRQIERSSRTLGCSWEFIPVDDGWGERPL |
| 214 | BoNT/A1-KR10 (K11R, | MPFVNKQFNYRDPVNGVDIAYIKIPNAGQMQPVKAFKIHNKIWVIPERDT |
| | K289R, K291R, K299R, | FTNPEEGDLNPPPEAKQVPVSYYDSTYLSTDNEKDNYLKGVTKLFERIYSTDL |
| | K335R, K337R, K343R, | GRMLLTSIVRGIPFWGGSTIDTELKVIDTNCINVIQPDGSYRSEELNLVIIGPS |
| | K375R, K381R, K415R) | ADIIQFECKSFGHEVLNLTRNGYGSTQYIRFSPDFTFGFEESLEVDTNPLLGA |
| | with a thrombin | GKFATDPAVTLAHELIHAGHRLYGIAINPNRVFKVNTNAYYEMSGLEVSFEE |
| | cleavage site | LRTFGGHDAKFIDSLQENEFRLYYYNRFRDIASTLNRAKSIVGTTASLQYMK |
| | | NVFKEKYLLSEDTSGKFSVDRLRFDKLYRMLTEIYTEDNFVKFFKVLNRKTYL |
| | | NFDKAVFRINIVPRVNYTIYDGFNLRNTNLAANFNGQNTEINNMNFTRLK |
| | | NFTGLFEFYKLLCVRGIITSTSLVPRGSALNDLCIKVNNWDLFFSPSEDNFTN |
| | | DLNKGEEITSDTNIEAAEENISLDLIQQYYLTFNFDNEPENISIENLSSDIIGQL |
| | | ELMPNIERFPNGKKYELDKYTMFHYLRAQEFEHGKSRIALTNSVNEALLNPS |
| | | RVYTFFSSDYVKKVNKATEAAMFLGWVEQLVYDFTDETSEVSTTDKIADITII |
| | | IPYIGPALNIGNMLYKDDFVGALIFSGAVILLEFIPEIAIPVLGTFALVSYIANKV |
| | | LTVQTIDNALSKRNEKWDEVYKYIVTNWLAKVNTQIDLIRKKMKEALENQA |
| | | EATKAIINYQYNQYTEEEKNNINFNIDDLSSKLNESINKAMININKFLNQCSV |
| | | SYLMNSMIPYGVKRLEDFDASLKDALLKYIYDNRGTLIGQVDRLKDKVNNTL |
| | | STDIPFQLSKYVDNQRLLSTFTEYIKNIINTSILNLRYESNHLIDLSRYASKINIG |
| | | SKVNFDPIDKNQIQLFNLESSKIEVILKNAIVYNSMYENFSTSFWIRIPKYFNSI |
| | | SLNNEYTIINCMENNSGWKVSLNYGEIIWTLQDTQEIKQRVVFKYSQMINIS |
| | | DYINRWIFVTITNNRLNNSKIYINGRLIDQKPISNLGNIHASNNIMFKLDGCR |
| | | DTHRYIWIKYFNLFDKELNEKEIKDLYDNQSNSGILKDFWGDYLQYDKPYY |
| | | MLNLYDPNKYVDVNNVGIRGYMYLKGPRGSVMTTNIYLNSSLYRGTKFIIK |
| | | KYASGNKDNIVRNNDRVYINVVVKNKEYRLATNASQAGVEKILSALEIPDV |
| | | GNLSQVVVMKSKNDQGITNKCKMNLQDNNGNDIGFIGFHQFNNIAKLVA |
| | | SNWYNRQIERSSRTLGCSWEFIPVDDGWGERPL |
| 215 | BoNT/A2-WT with a | MPFVNKQFNYKDPVNGVDIAYIKIPNAGQMQPVKAFKIHNKIWVIPERDT |
| | thrombin cleavage | FTNPEEGDLNPPPEAKQVPVSYYDSTYLSTDNEKDNYLKGVTKLFERIYSTDL |
| | site | GRMLLTSIVRGIPFWGGSTIDTELKVIDTNCINVIQPDGSYRSEELNLVIIGPS |
| | | ADIIQFECKSFGHDVLNLTRNGYGSTQYIRFSPDFTFGFEESLEVDTNPLLGA |
| | | GKFATDPAVTLAHELIHAEHRLYGIAINPNRVFKVNTNAYYEMSGLEVSFEE |
| | | LRTFGGHDAKFIDSLQENEFRLYYYNKFKDVASTLNKAKSIIGTTASLQYMK |
| | | NVFKEKYLLSEDTSGKFSVDKLKFDKLYKMLTEIYTEDNFVNFFKVINRKTYL |
| | | NFDKAVFRINIVPDENYTIKDGFNLKGANLSTNFNGQNTEINSRNFTRLKNF |
| | | TGLFEFYKLLCVRGIIPFTSLVPRGSALNDLCIKVNNWDLFFSPSEDNFTNDL |
| | | DKVEEITADTNIEAAEENISLDLIQQYYLTFDFDNEPENISIENLSSDIIGQLEP |
| | | MPNIERFPNGKKYELDKYTMFHYLRAQEFEHGDSRIILTNSAEEALLKPNVA |
| | | YTFFSSKYVKKINKAVEAFMFLNWAEELVYDFTDETNEVTTMDKIADITIIVP |
| | | YIGPALNIGNMLSKGEFVEAIIFTGVVAMLEFIPEYALPVFGTFAIVSYIANKV |
| | | LTVQTINNALSKRNEKWDEVYKYTVTNWLAKVNTQIDLIREKMKKALENQ |
| | | AEATKAIINYQYNQYTEEEKNNINFNIDDLSSKLNESINSAMININKFLDQCS |
| | | VSYLMNSMIPYAVKRLKDFDASVRDVLLKYIYDNRGTLVLQVDRLKDEVNN |
| | | TLSADIPFQLSKYVDNKKLLSTFTEYIKNIVNTSILSIVYKKDDLIDLSRYGAKINI |
| | | GDRVYYDSIDKNQIKLINLESSTIEVILKNAIVYNSMYENFSTSFWIKIPKYFSKI |
| | | NLNNEYTIINCIENNSGWKVSLNYGEIIWTLQDNKQNIQRVVFKYSQMVNI |
| | | SDYINRWIFVTITNNRLTKSKIYINGRLIDQKPISNLGNIHASNKIMFKLDGCR |
| | | DPRRYIMIKYFNLFDKELNEKEIKDLYDSQSNSGILKDFWGNYLQYDKPYYM |
| | | LNLFDPNKYVDVNNIGIRGYMYLKGPRGSVVTTNIYLNSTLYEGTKFIIKKYA |
| | | SGNEDNIVRNNDRVYINVVVKNKEYRLATNASQAGVEKILSALEIPDVGNLS |
| | | QVVVMKSKDDQGIRNKCKMNLQDNNGNDIGFIGFHLYDNIAKLVASNWY |
| | | NRQVGKASRTFGCSWEFIPVDDGWGESSL |
| 216 | BoNT/A2-KR7 (K11R, | MPFVNKQFNYRDPVNGVDIAYIKIPNAGQMQPVKAFKIHNKIWVIPERDT |
| | K289R, K291R, K299R, | FTNPEEGDLNPPPEAKQVPVSYYDSTYLSTDNEKDNYLKGVTKLFERIYSTDL |
| | K335R, K337R, K343R) | GRMLLTSIVRGIPFWGGSTIDTELKVIDTNCINVIQPDGSYRSEELNLVIIGPS |
| | with a thrombin | ADIIQFECKSFGHDVLNLTRNGYGSTQYIRFSPDFTFGFEESLEVDTNPLLGA |
| | cleavage site | GKFATDPAVTLAHELIHAEHRLYGIAINPNRVFKVNTNAYYEMSGLEVSFEE |
| | | LRTFGGHDAKFIDSLQENEFRLYYYNRFRDVASTLNRAKSIIGTTASLQYMK |
| | | NVFKEKYLLSEDTSGKFSVDRLRFDKLYRMLTEIYTEDNFVNFFKVINRKTYL |
| | | NFDKAVFRINIVPDENYTIKDGFNLKGANLSTNFNGQNTEINSRNFTRLKNF |
| | | TGLFEFYKLLCVRGIIPFTSLVPRGSALNDLCIKVNNWDLFFSPSEDNFTNDL |
| | | DKVEEITADTNIEAAEENISLDLIQQYYLTFDFDNEPENISIENLSSDIIGQLEP |
| | | MPNIERFPNGKKYELDKYTMFHYLRAQEFEHGDSRIILTNSAEEALLKPNVA |
| | | YTFFSSKYVKKINKAVEAFMFLNWAEELVYDFTDETNEVTTMDKIADITIIVP |
| | | YIGPALNIGNMLSKGEFVEAIIFTGVVAMLEFIPEYALPVFGTFAIVSYIANKV |
| | | LTVQTINNALSKRNEKWDEVYKYTVTNWLAKVNTQIDLIREKMKKALENQ |
| | | AEATKAIINYQYNQYTEEEKNNINFNIDDLSSKLNESINSAMININKFLDQCS |
| | | VSYLMNSMIPYAVKRLKDFDASVRDVLLKYIYDNRGTLVLQVDRLKDEVNN |
| | | TLSADIPFQLSKYVDNKKLLSTFTEYIKNIVNTSILSIVYKKDDLIDLSRYGAKINI |
| | | GDRVYYDSIDKNQIKLINLESSTIEVILKNAIVYNSMYENFSTSFWIKIPKYFSKI |
| | | NLNNEYTIINCIENNSGWKVSLNYGEIIWTLQDNKQNIQRVVFKYSQMVNI |
| | | SDYINRWIFVTITNNRLTKSKIYINGRLIDQKPISNLGNIHASNKIMFKLDGCR |
| | | DPRRYIMIKYFNLFDKELNEKEIKDLYDSQSNSGILKDFWGNYLQYDKPYYM |
| | | LNLFDPNKYVDVNNIGIRGYMYLKGPRGSVVTTNIYLNSTLYEGTKFIIKKYA |
| | | SGNEDNIVRNNDRVYINVVVKNKEYRLATNASQAGVEKILSALEIPDVGNLS |
| | | QVVVMKSKDDQGIRNKCKMNLQDNNGNDIGFIGFHLYDNIAKLVASNWY |
| | | NRQVGKASRTFGCSWEFIPVDDGWGESSL |
| 217 | LC-HN BoNT/A1 KR10 - | MPFVNKQFNYRDPVNGVDIAYIKIPNAGQMQPVKAFKIHNKIWVIPERDT |
| | H_{C}/B w/ thrombin | FTNPEEGDLNPPPEAKQVPVSYYDSTYLSTDNEKDNYLKGVTKLFERIYSTDL |
| | cleavage site | GRMLLTSIVRGIPFWGGSTIDTELKVIDTNCINVIQPDGSYRSEELNLVIIGPS |
| | | ADIIQFECKSFGHEVLNLTRNGYGSTQYIRFSPDFTFGFEESLEVDTNPLLGA |
| | | GKFATDPAVTLAHELIHAGHRLYGIAINPNRVFKVNTNAYYEMSGLEVSFEE |
| | | LRTFGGHDAKFIDSLQENEFRLYYYNRFRDIASTLNRAKSIVGTTASLQYMK |
| | | NVFKEKYLLSEDTSGKFSVDRLRFDKLYRMLTEIYTEDNFVKFFKVLNRKTYL |
| | | NFDKAVFRINIVPRVNYTIYDGFNLRNTNLAANFNGQNTEINNMNFTRLK |
| | | NFTGLFEFYKLLCVRGIIPFTSLVPRGSALNDLCIKVNNWDLFFSPSEDNFTN |
| | | DLNKGEEITSDTNIEAAEENISLDLIQQYYLTFNFDNEPENISIENLSSDIIGQL |
| | | ELMPNIERFPNGKKYELDKYTMFHYLRAQEFEHGKSRIALTNSVNEALLNPS |
| | | RVYTFFSSDYVKKVNKATEAAMFLGWVEQLVYDFTDETSEVSTTDKIADITII |
| | | IPYIGPALNIGNMLYKDDFVGALIFSGAVILLEFIPEIAIPVLGTFALVSYIANKV |
| | | LTVQTIDNALSKRNEKWDEVYKYIVTNWLAKVNTQIDLIRKKMKETLENQA |
| | | EATKAIINYQYNQYTEEEKNNINFNIDDLSSKLNESINKAMININKFLNQCSV |
| | | SYLMNSMIPYGVKRLEDFDASLKDALLKYIYDNRGTLIGQVDRLKDKVNNTL |
| | | STDIPFQLSKYVDNQRLLSTFTEYIKNSEILNNIILNLRYRDNNLIDLSGYGAKV |
| | | EVYDGVKLNDKNQFKLTSSADSKIRVTQNQNIIFNSMFLDFSVSFWIRIPKY |
| | | RNDDIQNYIHNEYTIINCMKNNSGWKISIRGNRIIWTLIDINGKTKSVFFEYN |
| | | IREDISEYINRWFFVTITNNLDNAKIYINGTLESNMDIKDIGEVIVNGEITFKL |
| | | DGDVDRTQFIWMKYFSIFNTQLNQSNIKEIYKIQSYSEYLKDFWGNPLMYN |
| | | KEYYMFNAGNKNSYIKLVKDSSVGEILIRSKYNQNSNYINYRNLYIGEKFIIRR |
| | | ESNSQSINDDIVRKEDYIHLDLVLHHEEWRVYAYKYFKEQEEKLFLSIISDSNE |
| | | FYKTIEIKEYDEQPSYSCQLLFKKDEESTDDIGLIGIHRFYESGVLRKKYKDYFCI |
| | | SKWYLKEVKRKPYKSNLGCNWQFIPKDEGWTE |
| 218 | BoNT/A1 - KR10/ | MPFVNKQFNYRDPVNGVDIAYIKIPNAGQMQPVKAFKIHNKIWVIPERDT |
| | R1156M (of full | FTNPEEGDLNPPPEAKQVPVSYYDSTYLSTDNEKDNYLKGVTKLFERIYSTDL |
| | length) w/ thrombin | GRMLLTSIVRGIPFWGGSTIDTELKVIDTNCINVIQPDGSYRSEELNLVIIGPS |
| | cleavage site | ADIIQFECKSFGHEVLNLTRNGYGSTQYIRFSPDFTFGFEESLEVDTNPLLGA |
| | | GKFATDPAVTLAHELIHAGHRLYGIAINPNRVFKVNTNAYYEMSGLEVSFEE |
| | | LRTFGGHDAKFIDSLQENEFRLYYYNRFRDIASTLNRAKSIVGTTASLQYMK |
| | | NVFKEKYLLSEDTSGKFSVDRLRFDKLYRMLTEIYTEDNFVKFFKVLNRKTYL |
| | | NFDKAVFRINIVPRVNYTIYDGFNLRNTNLAANFNGQNTEINNMNFTRLK |
| | | NFTGLFEFYKLLCVRGIIPFTSLVPRGSALNDLCIKVNNWDLFFSPSEDNFTN |
| | | DLNKGEEITSDTNIEAAEENISLDLIQQYYLTFNFDNEPENISIENLSSDIIGQL |
| | | ELMPNIERFPNGKKYELDKYTMFHYLRAQEFEHGKSRIALTNSVNEALLNPS |
| | | RVYTFFSSDYVKKVNKATEAAMFLGWVEQLVYDFTDETSEVSTTDKIADITII |
| | | IPYIGPALNIGNMLYKDDFVGALIFSGAVILLEFIPEIAIPVLGTFALVSYIANKV |
| | | LTVQTIDNALSKRNEKWDEVYKYIVTNWLAKVNTQIDLIRKKMKETLENQA |
| | | EATKAIINYQYNQYTEEEKNNINFNIDDLSSKLNESINKAMININKFLNQCSV |
| | | SYLMNSMIPYGVKRLEDFDASLKDALLKYIYDNRGTLIGQVDRLKDKVNNTL |
| | | STDIPFQLSKYVDNQRLLSTFTEYIKNIINTSILNLRYESNHLIDLSRYASKINIG |
| | | SKVNFDPIDKNQIQLFNLESSKIEVILKNAIVYNSMYENFSTSFWIRIPKYFNSI |
| | | SLNNEYTIINCMENNSGWKVSLNYGEIIWTLQDTQEIKQRVVFKYSQMINIS |
| | | DYINRWIFVTITNNRLNNSKIYINGRLIDQKPISNLGNIHASNNIMFKLDGCR |
| | | DTHRYIWIKYFNLFDKELNEKEIKDLYDNQSNSGILKDFWGDYLQYDKPYY |
| | | MLNLYDPNKYVDVNNVGIRGYMYLKGPRGSVMTTNIYLNSSLYMGTKFIIK |
| | | KYASGNKDNIVRNNDRVYINVVVKNKEYRLATNASQAGVEKILSALEIPDV |
| | | GNLSQVVVMKSKNDQGITNKCKMNLQDNNGNDIGFIGFHQFNNIAKLVA |
| | | SNWYNRQIERSSRTLGCSWEFIPVDDGWGERPL |
| 219 | BoNT/A1 - KR10/ | MPFVNKQFNYRDPVNGVDIAYIKIPNAGQMQPVKAFKIHNKIWVIPERDT |
| | T1232R (of full length) | FTNPEEGDLNPPPEAKQVPVSYYDSTYLSTDNEKDNYLKGVTKLFERIYSTDL |
| | w/ thrombin cleavage | GRMLLTSIVRGIPFWGGSTIDTELKVIDTNCINVIQPDGSYRSEELNLVIIGPS |
| | site | ADIIQFECKSFGHEVLNLTRNGYGSTQYIRFSPDFTFGFEESLEVDTNPLLGA |
| | | GKFATDPAVTLAHELIHAGHRLYGIAINPNRVFKVNTNAYYEMSGLEVSFEE |
| | | LRTFGGHDAKFIDSLQENEFRLYYYNRFRDIASTLNRAKSIVGTTASLQYMK |
| | | NVFKEKYLLSEDTSGKFSVDRLRFDKLYRMLTEIYTEDNFVKFFKVLNRKTYL |
| | | NFDKAVFRINIVPRVNYTIYDGFNLRNTNLAANFNGQNTEINNMNFTRLK |
| | | NFTGLFEFYKLLCVRGIIPFTSLVPRGSALNDLCIKVNNWDLFFSPSEDNFTN |
| | | DLNKGEEITSDTNIEAAEENISLDLIQQYYLTFNFDNEPENISIENLSSDIIGQL |
| | | ELMPNIERFPNGKKYELDKYTMFHYLRAQEFEHGKSRIALTNSVNEALLNPS |
| | | RVYTFFSSDYVKKVNKATEAAMFLGWVEQLVYDFTDETSEVSTTDKIADITII |
| | | IPYIGPALNIGNMLYKDDFVGALIFSGAVILLEFIPEIAIPVLGTFALVSYIANKV |
| | | LTVQTIDNALSKRNEKWDEVYKYIVTNWLAKVNTQIDLIRKKMKETLENQA |
| | | EATKAIINYQYNQYTEEEKNNINFNIDDLSSKLNESINKAMININKFLNQCSV |
| | | SYLMNSMIPYGVKRLEDFDASLKDALLKYIYDNRGTLIGQVDRLKDKVNNTL |
| | | STDIPFQLSKYVDNQRLLSTFTEYIKNIINTSILNLRYESNHLIDLSRYASKINIG |
| | | SKVNFDPIDKNQIQLFNLESSKIEVILKNAIVYNSMYENFSTSFWIRIPKYFNSI |
| | | SLNNEYTIINCMENNSGWKVSLNYGEIIWTLQDTQEIKQRVVFKYSQMINIS |
| | | DYINRWIFVTITNNRLNNSKIYINGRLIDQKPISNLGNIHASNNIMFKLDGCR |
| | | DTHRYIWIKYFNLFDKELNEKEIKDLYDNQSNSGILKDFWGDYLQYDKPYY |
| | | MLNLYDPNKYVDVNNVGIRGYMYLKGPRGSVMTTNIYLNSSLYRGTKFIIK |
| | | KYASGNKDNIVRNNDRVYINVVVKNKEYRLATNASQAGVEKILSALEIPDV |
| | | GNLSQVVVMKSKNDQGIRNKCKMNLQDNNGNDIGFIGFHQFNNIAKLVA |
| | | SNWYNRQIERSSRTLGCSWEFIPVDDGWGERPL |

### REFERENCES: EXAMPLES

[0544] 1. Schiavo, G., Matteoli, M. & Montecucco, C. Neurotoxins affecting neuroexocytosis. Physiol Rev 80, 717-766 (2000).
[0545] 2. Dong, M., Masuyer, G. & Stenmark, P. Botulinum and Tetanus Neurotoxins. Annu Rev Biochem 88, 811-837 (2019).
[0546] 3. Johnson, E. A. Clostridial toxins as therapeutic agents: benefits of nature's most toxic proteins. Annu Rev Microbiol 53, 551-575 (1999).
[0547] 4. Aoki, K. R. Botulinum toxin: a successful therapeutic protein. Curr Med Chem 11, 3085-3092 (2004).
[0548] 5. Montecucco, C. & Molgo, J. Botulinal neurotoxins: revival of an old killer. Curr Opin Pharmacol 5, 274-279 (2005).
[0549] 6. Lange, O., Bigalke, H., Dengler, R., Wegner, F., deGroot, M. & Wohlfarth, K. Neutralizing antibodies and secondary therapy failure after treatment with botulinum toxin type A: much ado about nothing? Clin Neuropharmacol 32, 213-218 (2009).
[0550] 7 Chapman, M. A., Barron, R., Tanis, D. C., Gill, C. E. & Charles, P. D. Comparison of botulinum neurotoxin preparations for the treatment of cervical dystonia. Clin Ther 29, 1325-1337 (2007).
[0551] 8. Cote, T. R., Mohan, A. K., Polder, J. A., Walton, M. K. & Braun, M. M. Botulinum toxin type A injections: adverse events reported to the US Food and Drug Administration in therapeutic and cosmetic cases. J Am Acad Dermatol 53, 407-415 (2005).
[0552] 9. Tao, L., Peng, L., Berntsson, R. P., Liu, S. M., Park, S., Yu, F., Boone, C., Palan, S., Beard, M., Chabrier, P. E., Stenmark, P., Krupp, J. & Dong, M. Engineered botulinum neurotoxin B with improved efficacy for targeting human receptors. Nat Commun 8, 53 (2017).
[0553] 10. Elliott, M., Favre-Guilmard, C., Liu, S. M., Maignel, J., Masuyer, G., Beard, M., Boone, C., Carre, D., Kalinichev, M., Lezmi, S., Mir, I., Nicoleau, C., Palan, S., Perier, C., Raban, E., Zhang, S., Dong, M., Stenmark, P. & Krupp, J. Engineered botulinum neurotoxin B with improved binding to human receptors has enhanced efficacy in preclinical models. Sci Adv 5, eaau7196 (2019).
[0554] 11. Pirazzini, M., Henke, T., Rossetto, O., Mahrhold, S., Krez, N., Rummel, A., Montecucco, C. & Binz, T. Neutralisation of specific surface carboxylates speeds up translocation of botulinum neurotoxin type B enzymatic domain. FEBS Lett 587, 3831-3836 (2013).
[0555] 12. Guo, J., Pan, X., Zhao, Y. & Chen, S. Engineering Clostridia Neurotoxins with elevated catalytic activity. Toxicon 74, 158-166 (2013).
[0556] 13. de la Paz, M. L., Scheps, D., Jurk, M., Hofmann, F. & Frevert, J. Rational design of botulinum neurotoxin A1 mutants with improved oxidative stability. Toxicon 147, 54-57 (2018).
[0557] 14. Tsai, Y. C., Maditz, R., Kuo, C.-I., Fishman, P. S., Shoemaker, C. B., Oyler, G. A. & Weissman, A. M. Targeting botulinum neurotoxin persistence by the ubiquitin-proteasome system. Proceedings of the National Academy of Sciences 107, 16554-16559 (2010).
[0558] 15. Li, L., Vorobyov, I. & Allen, T. W. The different interactions of lysine and arginine side chains with lipid membranes. The Journal of Physical Chemistry B 117, 11906-11920 (2013).
[0559] 16. Åmand, H. L., Fant, K., Norden, B. & Esbjorner, E. K. Stimulated endocytosis in penetratin uptake: effect of arginine and lysine. Biochemical and biophysical research communications 371, 621-625 (2008).
[0560] 17. Zou, G., de Leeuw, E., Li, C., Pazgier, M., Li, C., Zeng, P., Lu, W.-Y., Lubkowski, J. & Lu, W. Toward understanding the cationicity of defensins ARG and LYS versus their noncoded analogs. Journal of biological chemistry 282, 19653-19665 (2007).
[0561] 18. Peck, M. W., Smith, T. J., Anniballi, F., Austin, J. W., Bano, L., Bradshaw, M., Cuervo, P., Cheng, L. W., Derman, Y., Dorner, B. G., Fisher, A., Hill, K. K., Kalb, S. R., Korkeala, H., Lindstrom, M., Lista, F., Luquez, C., Mazuet, C., Pirazzini, M., Popoff, M. R., Rossetto, O., Rummel, A., Sesardic, D., Singh, B. R. & Stringer, S. C. Historical Perspectives and Guidelines for Botulinum Neurotoxin Subtype Nomenclature. Toxins (Basel) 9(2017).
[0562] 19. Sternke, M., Tripp, K. W. & Barrick, D. Consensus sequence design as a general strategy to create hyperstable, biologically active proteins. Proceedings of the National Academy of Sciences 116, 11275-11284 (2019).
[0563] 20. Breidenbach, M. A. & Brunger, A. T. Substrate recognition strategy for botulinum neurotoxin serotype A. Nature 432, 925-929 (2004).
[0564] 21. Zhang, S., Masuyer, G., Zhang, J., Shen, Y., Lundin, D., Henriksson, L., Miyashita, S. I., Martinez-Carranza, M., Dong, M. & Stenmark, P. Identification and characterization of a novel botulinum neurotoxin. Nat Commun 8, 14130 (2017).
[0565] 22. Popp, M. W., Antos, J. M., Grotenbreg, G. M., Spooner, E. & Ploegh, H. L. Sortagging: a versatile method for protein labeling. Nat Chem Biol 3, 707-708 (2007).
[0566] 23. Aoki, K. R. A comparison of the safety margins of botulinum neurotoxin serotypes A, B, and F in mice. Toxicon 39, 1815-1820 (2001).
[0567] 24. Wang, J., Zurawski, T. H., Bodeker, M. O., Meng, J., Boddul, S., Aoki, K. R. & Dolly, J. O. Longer-acting and highly potent chimaeric inhibitors of excessive exocytosis created with domains from botulinum neurotoxin A and B. Biochem J 444, 59-67 (2012).
[0568] 25. Arnon, S. S., Schechter, R., Inglesby, T. V., Henderson, D. A., Bartlett, J. G., Ascher, M. S., Eitzen, E., Fine, A. D., Hauer, J., Layton, M., Lillibridge, S., Osterholm, M. T., O'Toole, T., Parker, G., Perl, T. M., Russell, P. K., Swerdlow, D. L. & Tonat, K. Botulinum toxin as a biological weapon: medical and public health management. Jama 285, 1059-1070 (2001).
[0569] 26. Gustafsson, R., Zhang, S., Masuyer, G., Dong, M. & Stenmark, P. Crystal structure of botulinum neurotoxin A2 in complex with the human protein receptor SV2C reveals plasticity in receptor binding. Toxins 10, 153 (2018).
[0570] 27. Peng, L., Tepp, W. H., Johnson, E. A. & Dong, M. Botulinum neurotoxin D uses synaptic vesicle protein SV2 and gangliosides as receptors. PLoS Pathog 7, e1002008 (2011).

The application's sequence listing, which the Patent Office published only in electronic form, follows.

SEQUENCE LISTING (227 sequences)

SEQ ID NO: 1 - protein, 1296 aa, Clostridium botulinum
MPFVNKQFNYKDPVNGVDIAYIKIPNAGQMQPVKAFKIHNKIWVIPERDTFTNPEEGDLNPPPEAKQVPVSYYDSTYLSTDNEKDNYLKGVTKLFERIYSTDLGRMLLTSIVRGIPFWGGSTIDTELKVIDTNCINVIQPDGSYRSEELNLVIIGPSADIIQFECKSFGHEVLNLTRNGYGSTQYIRFSPDFTFGFEESLEVDTNPLLGAGKFATDPAVTLAHELIHAGHRLYGIAINPNRVFKVNTNAYYEMSGLEVSFEELRTFGGHDAKFIDSLQENEFRLYYYNKFKDIASTLNKAKSIVGTTASLQYMKNVFKEKYLLSEDTSGKFSVDKLKFDKLYKMLTEIYTEDNFVKFFKVLNRKTYLNFDKAVFKINIVPKVNYTIYDGFNLRNTNLAANFNGQNTEINNMNFTKLKNFTGLFEFYKLLCVRGIITSKTKSLDKGYNKALNDLCIKVNNWDLFFSPSEDNFTNDLNKGEEITSDTNIEAAEENISLDLIQQYYLTFNFDNEPENISIENLSSDIIGQLELMPNIERFPNGKKYELDKYTMFHYLRAQEFEHGKSRIALTNSVNEALLNPSRVYTFFSSDYVKKVNKATEAAMFLGWVEQLVYDFTDETSEVSTTDKIADITIIIPYIGPALNIGNMLYKDDFVGALIFSGAVILLEFIPEIAIPVLGTFALVSYIANKVLTVQTIDNALSKRNEKWDEVYKYIVTNWLAKVNTQIDLIRKKMKEALENQAEATKAIINYQYNQYTEEEKNNINFNIDDLSSKLNESINKAMININKFLNQCSVSYLMNSMIPYGVKRLEDFDASLKDALLKYIYDNRGTLIGQVDRLKDKVNNTLSTDIPFQLSKYVDNQRLLSTFTEYIKNIINTSILNLRYESNHLIDLSRYASKINIGSKVNFDPIDKNQIQLFNLESSKIEVILKNAIVYNSMYENFSTSFWIRIPKYFNSISLNNEYTIINCMENNSGWKVSLNYGEIIWTLQDTQEIKQRVVFKYSQMINISDYINRWIFVTITNNRLNNSKIYINGRLIDQKPISNLGNIHASNNIMFKLDGCRDTHRYIWIKYFNLFDKELNEKEIKDLYDNQSNSGILKDFWGDYLQYDKPYYMLNLYDPNKYVDVNNVGIRGYMYLKGPRGSVMTTNIYLNSSLYRGTKFIIKKYASGNKDNIVRNNDRVYINVVVKNKEYRLATNASQAGVEKILSALEIPDVGNLSQVVVMKSKNDQGITNKCKMNLQDNNGNDIGFIGFHQFNNIAKLVASNWYNRQIERSSRTLGCSWEFIPVDDGWGERPL

SEQ ID NO: 2 - protein, 1296 aa, Artificial Sequence
  Synthetic
MPFVNKQFNYRDPVNGVDIAYIKIPNAGQMQPVKAFKIHNKIWVIPERDTFTNPEEGDLNPPPEAKQVPVSYYDSTYLSTDNEKDNYLKGVTKLFERIYSTDLGRMLLTSIVRGIPFWGGSTIDTELKVIDTNCINVIQPDGSYRSEELNLVIIGPSADIIQFECKSFGHEVLNLTRNGYGSTQYIRFSPDFTFGFEESLEVDTNPLLGAGKFATDPAVTLAHELIHAGHRLYGIAINPNRVFKVNTNAYYEMSGLEVSFEELRTFGGHDAKFIDSLQENEFRLYYYNKFKDIASTLNKAKSIVGTTASLQYMKNVFKEKYLLSEDTSGKFSVDKLKFDKLYKMLTEIYTEDNFVKFFKVLNRKTYLNFDKAVFKINIVPKVNYTIYDGFNLRNTNLAANFNGQNTEINNMNFTKLKNFTGLFEFYKLLCVRGIITSKTKSLDKGYNKALNDLCIKVNNWDLFFSPSEDNFTNDLNKGEEITSDTNIEAAEENISLDLIQQYYLTFNFDNEPENISIENLSSDIIGQLELMPNIERFPNGKKYELDKYTMFHYLRAQEFEHGKSRIALTNSVNEALLNPSRVYTFFSSDYVKKVNKATEAAMFLGWVEQLVYDFTDETSEVSTTDKIADITIIIPYIGPALNIGNMLYKDDFVGALIFSGAVILLEFIPEIAIPVLGTFALVSYIANKVLTVQTIDNALSKRNEKWDEVYKYIVTNWLAKVNTQIDLIRKKMKEALENQAEATKAIINYQYNQYTEEEKNNINFNIDDLSSKLNESINKAMININKFLNQCSVSYLMNSMIPYGVKRLEDFDASLKDALLKYIYDNRGTLIGQVDRLKDKVNNTLSTDIPFQLSKYVDNQRLLSTFTEYIKNIINTSILNLRYESNHLIDLSRYASKINIGSKVNFDPIDKNQIQLFNLESSKIEVILKNAIVYNSMYENFSTSFWIRIPKYFNSISLNNEYTIINCMENNSGWKVSLNYGEIIWTLQDTQEIKQRVVFKYSQMINISDYINRWIFVTITNNRLNNSKIYINGRLIDQKPISNLGNIHASNNIMFKLDGCRDTHRYIWIKYFNLFDKELNEKEIKDLYDNQSNSGILKDFWGDYLQYDKPYYMLNLYDPNKYVDVNNVGIRGYMYLKGPRGSVMTTNIYLNSSLYRGTKFIIKKYASGNKDNIVRNNDRVYINVVVKNKEYRLATNASQAGVEKILSALEIPDVGNLSQVVVMKSKNDQGITNKCKMNLQDNNGNDIGFIGFHQFNNIAKLVASNWYNRQIERSSRTLGCSWEFIPVDDGWGERPL

SEQ ID NO: 3 - protein, 1296 aa, Artificial Sequence
  Synthetic
MPFVNKQFNYKDPVNGVDIAYIKIPNAGQMQPVKAFKIHNRIWVIPERDTFTNPEEGDLNPPPEAKQVPVSYYDSTYLSTDNEKDNYLKGVTKLFERIYSTDLGRMLLTSIVRGIPFWGGSTIDTELKVIDTNCINVIQPDGSYRSEELNLVIIGPSADIIQFECKSFGHEVLNLTRNGYGSTQYIRFSPDFTFGFEESLEVDTNPLLGAGKFATDPAVTLAHELIHAGHRLYGIAINPNRVFKVNTNAYYEMSGLEVSFEELRTFGGHDAKFIDSLQENEFRLYYYNKFKDIASTLNKAKSIVGTTASLQYMKNVFKEKYLLSEDTSGKFSVDKLKFDKLYKMLTEIYTEDNFVKFFKVLNRKTYLNFDKAVFKINIVPKVNYTIYDGFNLRNTNLAANFNGQNTEINNMNFTKLKNFTGLFEFYKLLCVRGIITSKTKSLDKGYNKALNDLCIKVNNWDLFFSPSEDNFTNDLNKGEEITSDTNIEAAEENISLDLIQQYYLTFNFDNEPENISIENLSSDIIGQLELMPNIERFPNGKKYELDKYTMFHYLRAQEFEHGKSRIALTNSVNEALLNPSRVYTFFSSDYVKKVNKATEAAMFLGWVEQLVYDFTDETSEVSTTDKIADITIIIPYIGPALNIGNMLYKDDFVGALIFSGAVILLEFIPEIAIPVLGTFALVSYIANKVLTVQTIDNALSKRNEKWDEVYKYIVTNWLAKVNTQIDLIRKKMKEALENQAEATKAIINYQYNQYTEEEKNNINFNIDDLSSKLNESINKAMININKFLNQCSVSYLMNSMIPYGVKRLEDFDASLKDALLKYIYDNRGTLIGQVDRLKDKVNNTLSTDIPFQLSKYVDNQRLLSTFTEYIKNIINTSILNLRYESNHLIDLSRYASKINIGSKVNFDPIDKNQIQLFNLESSKIEVILKNAIVYNSMYENFSTSFWIRIPKYFNSISLNNEYTIINCMENNSGWKVSLNYGEIIWTLQDTQEIKQRVVFKYSQMINISDYINRWIFVTITNNRLNNSKIYINGRLIDQKPISNLGNIHASNNIMFKLDGCRDTHRYIWIKYFNLFDKELNEKEIKDLYDNQSNSGILKDFWGDYLQYDKPYYMLNLYDPNKYVDVNNVGIRGYMYLKGPRGSVMTTNIYLNSSLYRGTKFIIKKYASGNKDNIVRNNDRVYINVVVKNKEYRLATNASQAGVEKILSALEIPDVGNLSQVVVMKSKNDQGITNKCKMNLQDNNGNDIGFIGFHQFNNIAKLVASNWYNRQIERSSRTLGCSWEFIPVDDGWGERPL

SEQ ID NO: 4 - protein, 1296 aa, Artificial Sequence
  Synthetic
MPFVNKQFNYKDPVNGVDIAYIKIPNAGQMQPVKAFKIHNKIWVIPERDTFTNPEEGDLNPPPEAKQVPVSYYDSTYLSTDNEKDNYLKGVTKLFERIYSTDLGRMLLTSIVRGIPFWGGSTIDTELKVIDTNCINVIQPDGSYRSEELNLVIIGPSADIIQFECKSFGHEVLNLTRNGYGSTQYIRFSPDFTFGFEESLEVDTNPLLGAGRFATDPAVTLAHELIHAGHRLYGIAINPNRVFKVNTNAYYEMSGLEVSFEELRTFGGHDAKFIDSLQENEFRLYYYNKFKDIASTLNKAKSIVGTTASLQYMKNVFKEKYLLSEDTSGKFSVDKLKFDKLYKMLTEIYTEDNFVKFFKVLNRKTYLNFDKAVFKINIVPKVNYTIYDGFNLRNTNLAANFNGQNTEINNMNFTKLKNFTGLFEFYKLLCVRGIITSKTKSLDKGYNKALNDLCIKVNNWDLFFSPSEDNFTNDLNKGEEITSDTNIEAAEENISLDLIQQYYLTFNFDNEPENISIENLSSDIIGQLELMPNIERFPNGKKYELDKYTMFHYLRAQEFEHGKSRIALTNSVNEALLNPSRVYTFFSSDYVKKVNKATEAAMFLGWVEQLVYDFTDETSEVSTTDKIADITIIIPYIGPALNIGNMLYKDDFVGALIFSGAVILLEFIPEIAIPVLGTFALVSYIANKVLTVQTIDNALSKRNEKWDEVYKYIVTNWLAKVNTQIDLIRKKMKEALENQAEATKAIINYQYNQYTEEEKNNINFNIDDLSSKLNESINKAMININKFLNQCSVSYLMNSMIPYGVKRLEDFDASLKDALLKYIYDNRGTLIGQVDRLKDKVNNTLSTDIPFQLSKYVDNQRLLSTFTEYIKNIINTSILNLRYESNHLIDLSRYASKINIGSKVNFDPIDKNQIQLFNLESSKIEVILKNAIVYNSMYENFSTSFWIRIPKYFNSISLNNEYTIINCMENNSGWKVSLNYGEIIWTLQDTQEIKQRVVFKYSQMINISDYINRWIFVTITNNRLNNSKIYINGRLIDQKPISNLGNIHASNNIMFKLDGCRDTHRYIWIKYFNLFDKELNEKEIKDLYDNQSNSGILKDFWGDYLQYDKPYYMLNLYDPNKYVDVNNVGIRGYMYLKGPRGSVMTTNIYLNSSLYRGTKFIIKKYASGNKDNIVRNNDRVYINVVVKNKEYRLATNASQAGVEKILSALEIPDVGNLSQVVVMKSKNDQGITNKCKMNLQDNNGNDIGFIGFHQFNNIAKLVASNWYNRQIERSSRTLGCSWEFIPVDDGWGERPL

SEQ ID NO: 5 - protein, 1296 aa, Artificial Sequence
  Synthetic
MPFVNKQFNYKDPVNGVDIAYIKIPNAGQMQPVKAFKIHNKIWVIPERDTFTNPEEGDLNPPPEAKQVPVSYYDSTYLSTDNEKDNYLKGVTKLFERIYSTDLGRMLLTSIVRGIPFWGGSTIDTELKVIDTNCINVIQPDGSYRSEELNLVIIGPSADIIQFECKSFGHEVLNLTRNGYGSTQYIRFSPDFTFGFEESLEVDTNPLLGAGKFATDPAVTLAHELIHAGHRLYGIAINPNRVFKVNTNAYYEMSGLEVSFEELRTFGGHDARFIDSLQENEFRLYYYNKFKDIASTLNKAKSIVGTTASLQYMKNVFKEKYLLSEDTSGKFSVDKLKFDKLYKMLTEIYTEDNFVKFFKVLNRKTYLNFDKAVFKINIVPKVNYTIYDGFNLRNTNLAANFNGQNTEINNMNFTKLKNFTGLFEFYKLLCVRGIITSKTKSLDKGYNKALNDLCIKVNNWDLFFSPSEDNFTNDLNKGEEITSDTNIEAAEENISLDLIQQYYLTFNFDNEPENISIENLSSDIIGQLELMPNIERFPNGKKYELDKYTMFHYLRAQEFEHGKSRIALTNSVNEALLNPSRVYTFFSSDYVKKVNKATEAAMFLGWVEQLVYDFTDETSEVSTTDKIADITIIIPYIGPALNIGNMLYKDDFVGALIFSGAVILLEFIPEIAIPVLGTFALVSYIANKVLTVQTIDNALSKRNEKWDEVYKYIVTNWLAKVNTQIDLIRKKMKEALENQAEATKAIINYQYNQYTEEEKNNINFNIDDLSSKLNESINKAMININKFLNQCSVSYLMNSMIPYGVKRLEDFDASLKDALLKYIYDNRGTLIGQVDRLKDKVNNTLSTDIPFQLSKYVDNQRLLSTFTEYIKNIINTSILNLRYESNHLIDLSRYASKINIGSKVNFDPIDKNQIQLFNLESSKIEVILKNAIVYNSMYENFSTSFWIRIPKYFNSISLNNEYTIINCMENNSGWKVSLNYGEIIWTLQDTQEIKQRVVFKYSQMINISDYINRWIFVTITNNRLNNSKIYINGRLIDQKPISNLGNIHASNNIMFKLDGCRDTHRYIWIKYFNLFDKELNEKEIKDLYDNQSNSGILKDFWGDYLQYDKPYYMLNLYDPNKYVDVNNVGIRGYMYLKGPRGSVMTTNIYLNSSLYRGTKFIIKKYASGNKDNIVRNNDRVYINVVVKNKEYRLATNASQAGVEKILSALEIPDVGNLSQVVVMKSKNDQGITNKCKMNLQDNNGNDIGFIGFHQFNNIAKLVASNWYNRQIERSSRTLGCSWEFIPVDDGWGERPL

SEQ ID NO: 6 - protein, 1296 aa, Artificial Sequence
  Synthetic
MPFVNKQFNYKDPVNGVDIAYIKIPNAGQMQPVKAFKIHNKIWVIPERDTFTNPEEGDLNPPPEAKQVPVSYYDSTYLSTDNEKDNYLKGVTKLFERIYSTDLGRMLLTSIVRGIPFWGGSTIDTELKVIDTNCINVIQPDGSYRSEELNLVIIGPSADIIQFECKSFGHEVLNLTRNGYGSTQYIRFSPDFTFGFEESLEVDTNPLLGAGKFATDPAVTLAHELIHAGHRLYGIAINPNRVFKVNTNAYYEMSGLEVSFEELRTFGGHDAKFIDSLQENEFRLYYYNRFKDIASTLNKAKSIVGTTASLQYMKNVFKEKYLLSEDTSGKFSVDKLKFDKLYKMLTEIYTEDNFVKFFKVLNRKTYLNFDKAVFKINIVPKVNYTIYDGFNLRNTNLAANFNGQNTEINNMNFTKLKNFTGLFEFYKLLCVRGIITSKTKSLDKGYNKALNDLCIKVNNWDLFFSPSEDNFTNDLNKGEEITSDTNIEAAEENISLDLIQQYYLTFNFDNEPENISIENLSSDIIGQLELMPNIERFPNGKKYELDKYTMFHYLRAQEFEHGKSRIALTNSVNEALLNPSRVYTFFSSDYVKKVNKATEAAMFLGWVEQLVYDFTDETSEVSTTDKIADITIIIPYIGPALNIGNMLYKDDFVGALIFSGAVILLEFIPEIAIPVLGTFALVSYIANKVLTVQTIDNALSKRNEKWDEVYKYIVTNWLAKVNTQIDLIRKKMKEALENQAEATKAIINYQYNQYTEEEKNNINFNIDDLSSKLNESINKAMININKFLNQCSVSYLMNSMIPYGVKRLEDFDASLKDALLKYIYDNRGTLIGQVDRLKDKVNNTLSTDIPFQLSKYVDNQRLLSTFTEYIKNIINTSILNLRYESNHLIDLSRYASKINIGSKVNFDPIDKNQIQLFNLESSKIEVILKNAIVYNSMYENFSTSFWIRIPKYFNSISLNNEYTIINCMENNSGWKVSLNYGEIIWTLQDTQEIKQRVVFKYSQMINISDYINRWIFVTITNNRLNNSKIYINGRLIDQKPISNLGNIHASNNIMFKLDGCRDTHRYIWIKYFNLFDKELNEKEIKDLYDNQSNSGILKDFWGDYLQYDKPYYMLNLYDPNKYVDVNNVGIRGYMYLKGPRGSVMTTNIYLNSSLYRGTKFIIKKYASGNKDNIVRNNDRVYINVVVKNKEYRLATNASQAGVEKILSALEIPDVGNLSQVVVMKSKNDQGITNKCKMNLQDNNGNDIGFIGFHQFNNIAKLVASNWYNRQIERSSRTLGCSWEFIPVDDGWGERPL

SEQ ID NO: 7 - protein, 1296 aa, Artificial Sequence
  Synthetic
MPFVNKQFNYKDPVNGVDIAYIKIPNAGQMQPVKAFKIHNKIWVIPERDTFTNPEEGDLNPPPEAKQVPVSYYDSTYLSTDNEKDNYLKGVTKLFERIYSTDLGRMLLTSIVRGIPFWGGSTIDTELKVIDTNCINVIQPDGSYRSEELNLVIIGPSADIIQFECKSFGHEVLNLTRNGYGSTQYIRFSPDFTFGFEESLEVDTNPLLGAGKFATDPAVTLAHELIHAGHRLYGIAINPNRVFKVNTNAYYEMSGLEVSFEELRTFGGHDAKFIDSLQENEFRLYYYNKFRDIASTLNKAKSIVGTTASLQYMKNVFKEKYLLSEDTSGKFSVDKLKFDKLYKMLTEIYTEDNFVKFFKVLNRKTYLNFDKAVFKINIVPKVNYTIYDGFNLRNTNLAANFNGQNTEINNMNFTKLKNFTGLFEFYKLLCVRGIITSKTKSLDKGYNKALNDLCIKVNNWDLFFSPSEDNFTNDLNKGEEITSDTNIEAAEENISLDLIQQYYLTFNFDNEPENISIENLSSDIIGQLELMPNIERFPNGKKYELDKYTMFHYLRAQEFEHGKSRIALTNSVNEALLNPSRVYTFFSSDYVKKVNKATEAAMFLGWVEQLVYDFTDETSEVSTTDKIADITIIIPYIGPALNIGNMLYKDDFVGALIFSGAVILLEFIPEIAIPVLGTFALVSYIANKVLTVQTIDNALSKRNEKWDEVYKYIVTNWLAKVNTQIDLIRKKMKEALENQAEATKAIINYQYNQYTEEEKNNINFNIDDLSSKLNESINKAMININKFLNQCSVSYLMNSMIPYGVKRLEDFDASLKDALLKYIYDNRGTLIGQVDRLKDKVNNTLSTDIPFQLSKYVDNQRLLSTFTEYIKNIINTSILNLRYESNHLIDLSRYASKINIGSKVNFDPIDKNQIQLFNLESSKIEVILKNAIVYNSMYENFSTSFWIRIPKYFNSISLNNEYTIINCMENNSGWKVSLNYGEIIWTLQDTQEIKQRVVFKYSQMINISDYINRWIFVTITNNRLNNSKIYINGRLIDQKPISNLGNIHASNNIMFKLDGCRDTHRYIWIKYFNLFDKELNEKEIKDLYDNQSNSGILKDFWGDYLQYDKPYYMLNLYDPNKYVDVNNVGIRGYMYLKGPRGSVMTTNIYLNSSLYRGTKFIIKKYASGNKDNIVRNNDRVYINVVVKNKEYRLATNASQAGVEKILSALEIPDVGNLSQVVVMKSKNDQGITNKCKMNLQDNNGNDIGFIGFHQFNNIAKLVASNWYNRQIERSSRTLGCSWEFIPVDDGWGERPL

SEQ ID NO: 8 - protein, 1296 aa, Artificial Sequence
  Synthetic
MPFVNKQFNYKDPVNGVDIAYIKIPNAGQMQPVKAFKIHNKIWVIPERDTFTNPEEGDLNPPPEAKQVPVSYYDSTYLSTDNEKDNYLKGVTKLFERIYSTDLGRMLLTSIVRGIPFWGGSTIDTELKVIDTNCINVIQPDGSYRSEELNLVIIGPSADIIQFECKSFGHEVLNLTRNGYGSTQYIRFSPDFTFGFEESLEVDTNPLLGAGKFATDPAVTLAHELIHAGHRLYGIAINPNRVFKVNTNAYYEMSGLEVSFEELRTFGGHDAKFIDSLQENEFRLYYYNKFKDIASTLNRAKSIVGTTASLQYMKNVFKEKYLLSEDTSGKFSVDKLKFDKLYKMLTEIYTEDNFVKFFKVLNRKTYLNFDKAVFKINIVPKVNYTIYDGFNLRNTNLAANFNGQNTEINNMNFTKLKNFTGLFEFYKLLCVRGIITSKTKSLDKGYNKALNDLCIKVNNWDLFFSPSEDNFTNDLNKGEEITSDTNIEAAEENISLDLIQQYYLTFNFDNEPENISIENLSSDIIGQLELMPNIERFPNGKKYELDKYTMFHYLRAQEFEHGKSRIALTNSVNEALLNPSRVYTFFSSDYVKKVNKATEAAMFLGWVEQLVYDFTDETSEVSTTDKIADITIIIPYIGPALNIGNMLYKDDFVGALIFSGAVILLEFIPEIAIPVLGTFALVSYIANKVLTVQTIDNALSKRNEKWDEVYKYIVTNWLAKVNTQIDLIRKKMKEALENQAEATKAIINYQYNQYTEEEKNNINFNIDDLSSKLNESINKAMININKFLNQCSVSYLMNSMIPYGVKRLEDFDASLKDALLKYIYDNRGTLIGQVDRLKDKVNNTLSTDIPFQLSKYVDNQRLLSTFTEYIKNIINTSILNLRYESNHLIDLSRYASKINIGSKVNFDPIDKNQIQLFNLESSKIEVILKNAIVYNSMYENFSTSFWIRIPKYFNSISLNNEYTIINCMENNSGWKVSLNYGEIIWTLQDTQEIKQRVVFKYSQMINISDYINRWIFVTITNNRLNNSKIYINGRLIDQKPISNLGNIHASNNIMFKLDGCRDTHRYIWIKYFNLFDKELNEKEIKDLYDNQSNSGILKDFWGDYLQYDKPYYMLNLYDPNKYVDVNNVGIRGYMYLKGPRGSVMTTNIYLNSSLYRGTKFIIKKYASGNKDNIVRNNDRVYINVVVKNKEYRLATNASQAGVEKILSALEIPDVGNLSQVVVMKSKNDQGITNKCKMNLQDNNGNDIGFIGFHQFNNIAKLVASNWYNRQIERSSRTLGCSWEFIPVDDGWGERPL

SEQ ID NO: 9 - protein, 1296 aa, Artificial Sequence
  Synthetic
MPFVNKQFNYKDPVNGVDIAYIKIPNAGQMQPVKAFKIHNKIWVIPERDTFTNPEEGDLNPPPEAKQVPVSYYDSTYLSTDNEKDNYLKGVTKLFERIYSTDLGRMLLTSIVRGIPFWGGSTIDTELKVIDTNCINVIQPDGSYRSEELNLVIIGPSADIIQFECKSFGHEVLNLTRNGYGSTQYIRFSPDFTFGFEESLEVDTNPLLGAGKFATDPAVTLAHELIHAGHRLYGIAINPNRVFKVNTNAYYEMSGLEVSFEELRTFGGHDAKFIDSLQENEFRLYYYNKFKDIASTLNKAKSIVGTTASLQYMKNVFREKYLLSEDTSGKFSVDKLKFDKLYKMLTEIYTEDNFVKFFKVLNRKTYLNFDKAVFKINIVPKVNYTIYDGFNLRNTNLAANFNGQNTEINNMNFTKLKNFTGLFEFYKLLCVRGIITSKTKSLDKGYNKALNDLCIKVNNWDLFFSPSEDNFTNDLNKGEEITSDTNIEAAEENISLDLIQQYYLTFNFDNEPENISIENLSSDIIGQLELMPNIERFPNGKKYELDKYTMFHYLRAQEFEHGKSRIALTNSVNEALLNPSRVYTFFSSDYVKKVNKATEAAMFLGWVEQLVYDFTDETSEVSTTDKIADITIIIPYIGPALNIGNMLYKDDFVGALIFSGAVILLEFIPEIAIPVLGTFALVSYIANKVLTVQTIDNALSKRNEKWDEVYKYIVTNWLAKVNTQIDLIRKKMKEALENQAEATKAIINYQYNQYTEEEKNNINFNIDDLSSKLNESINKAMININKFLNQCSVSYLMNSMIPYGVKRLEDFDASLKDALLKYIYDNRGTLIGQVDRLKDKVNNTLSTDIPFQLSKYVDNQRLLSTFTEYIKNIINTSILNLRYESNHLIDLSRYASKINIGSKVNFDPIDKNQIQLFNLESSKIEVILKNAIVYNSMYENFSTSFWIRIPKYFNSISLNNEYTIINCMENNSGWKVSLNYGEIIWTLQDTQEIKQRVVFKYSQMINISDYINRWIFVTITNNRLNNSKIYINGRLIDQKPISNLGNIHASNNIMFKLDGCRDTHRYIWIKYFNLFDKELNEKEIKDLYDNQSNSGILKDFWGDYLQYDKPYYMLNLYDPNKYVDVNNVGIRGYMYLKGPRGSVMTTNIYLNSSLYRGTKFIIKKYASGNKDNIVRNNDRVYINVVVKNKEYRLATNASQAGVEKILSALEIPDVGNLSQVVVMKSKNDQGITNKCKMNLQDNNGNDIGFIGFHQFNNIAKLVASNWYNRQIERSSRTLGCSWEFIPVDDGWGERPL

SEQ ID NO: 10 - protein, 1296 aa, Artificial Sequence
  Synthetic
MPFVNKQFNYKDPVNGVDIAYIKIPNAGQMQPVKAFKIHNKIWVIPERDTFTNPEEGDLNPPPEAKQVPVSYYDSTYLSTDNEKDNYLKGVTKLFERIYSTDLGRMLLTSIVRGIPFWGGSTIDTELKVIDTNCINVIQPDGSYRSEELNLVIIGPSADIIQFECKSFGHEVLNLTRNGYGSTQYIRFSPDFTFGFEESLEVDTNPLLGAGKFATDPAVTLAHELIHAGHRLYGIAINPNRVFKVNTNAYYEMSGLEVSFEELRTFGGHDAKFIDSLQENEFRLYYYNKFKDIASTLNKAKSIVGTTASLQYMKNVFKEKYLLSEDTSGKFSVDRLKFDKLYKMLTEIYTEDNFVKFFKVLNRKTYLNFDKAVFKINIVPKVNYTIYDGFNLRNTNLAANFNGQNTEINNMNFTKLKNFTGLFEFYKLLCVRGIITSKTKSLDKGYNKALNDLCIKVNNWDLFFSPSEDNFTNDLNKGEEITSDTNIEAAEENISLDLIQQYYLTFNFDNEPENISIENLSSDIIGQLELMPNIERFPNGKKYELDKYTMFHYLRAQEFEHGKSRIALTNSVNEALLNPSRVYTFFSSDYVKKVNKATEAAMFLGWVEQLVYDFTDETSEVSTTDKIADITIIIPYIGPALNIGNMLYKDDFVGALIFSGAVILLEFIPEIAIPVLGTFALVSYIANKVLTVQTIDNALSKRNEKWDEVYKYIVTNWLAKVNTQIDLIRKKMKEALENQAEATKAIINYQYNQYTEEEKNNINFNIDDLSSKLNESINKAMININKFLNQCSVSYLMNSMIPYGVKRLEDFDASLKDALLKYIYDNRGTLIGQVDRLKDKVNNTLSTDIPFQLSKYVDNQRLLSTFTEYIKNIINTSILNLRYESNHLIDLSRYASKINIGSKVNFDPIDKNQIQLFNLESSKIEVILKNAIVYNSMYENFSTSFWIRIPKYFNSISLNNEYTIINCMENNSGWKVSLNYGEIIWTLQDTQEIKQRVVFKYSQMINISDYINRWIFVTITNNRLNNSKIYINGRLIDQKPISNLGNIHASNNIMFKLDGCRDTHRYIWIKYFNLFDKELNEKEIKDLYDNQSNSGILKDFWGDYLQYDKPYYMLNLYDPNKYVDVNNVGIRGYMYLKGPRGSVMTTNIYLNSSLYRGTKFIIKKYASGNKDNIVRNNDRVYINVVVKNKEYRLATNASQAGVEKILSALEIPDVGNLSQVVVMKSKNDQGITNKCKMNLQDNNGNDIGFIGFHQFNNIAKLVASNWYNRQIERSSRTLGCSWEFIPVDDGWGERPL

SEQ ID NO: 11 - protein, 1296 aa, Artificial Sequence
  Synthetic
MPFVNKQFNYKDPVNGVDIAYIKIPNAGQMQPVKAFKIHNKIWVIPERDTFTNPEEGDLNPPPEAKQVPVSYYDSTYLSTDNEKDNYLKGVTKLFERIYSTDLGRMLLTSIVRGIPFWGGSTIDTELKVIDTNCINVIQPDGSYRSEELNLVIIGPSADIIQFECKSFGHEVLNLTRNGYGSTQYIRFSPDFTFGFEESLEVDTNPLLGAGKFATDPAVTLAHELIHAGHRLYGIAINPNRVFKVNTNAYYEMSGLEVSFEELRTFGGHDAKFIDSLQENEFRLYYYNKFKDIASTLNKAKSIVGTTASLQYMKNVFKEKYLLSEDTSGKFSVDKLRFDKLYKMLTEIYTEDNFVKFFKVLNRKTYLNFDKAVFKINIVPKVNYTIYDGFNLRNTNLAANFNGQNTEINNMNFTKLKNFTGLFEFYKLLCVRGIITSKTKSLDKGYNKALNDLCIKVNNWDLFFSPSEDNFTNDLNKGEEITSDTNIEAAEENISLDLIQQYYLTFNFDNEPENISIENLSSDIIGQLELMPNIERFPNGKKYELDKYTMFHYLRAQEFEHGKSRIALTNSVNEALLNPSRVYTFFSSDYVKKVNKATEAAMFLGWVEQLVYDFTDETSEVSTTDKIADITIIIPYIGPALNIGNMLYKDDFVGALIFSGAVILLEFIPEIAIPVLGTFALVSYIANKVLTVQTIDNALSKRNEKWDEVYKYIVTNWLAKVNTQIDLIRKKMKEALENQAEATKAIINYQYNQYTEEEKNNINFNIDDLSSKLNESINKAMININKFLNQCSVSYLMNSMIPYGVKRLEDFDASLKDALLKYIYDNRGTLIGQVDRLKDKVNNTLSTDIPFQLSKYVDNQRLLSTFTEYIKNIINTSILNLRYESNHLIDLSRYASKINIGSKVNFDPIDKNQIQLFNLESSKIEVILKNAIVYNSMYENFSTSFWIRIPKYFNSISLNNEYTIINCMENNSGWKVSLNYGEIIWTLQDTQEIKQRVVFKYSQMINISDYINRWIFVTITNNRLNNSKIYINGRLIDQKPISNLGNIHASNNIMFKLDGCRDTHRYIWIKYFNLFDKELNEKEIKDLYDNQSNSGILKDFWGDYLQYDKPYYMLNLYDPNKYVDVNNVGIRGYMYLKGPRGSVMTTNIYLNSSLYRGTKFIIKKYASGNKDNIVRNNDRVYINVVVKNKEYRLATNASQAGVEKILSALEIPDVGNLSQVVVMKSKNDQGITNKCKMNLQDNNGNDIGFIGFHQFNNIAKLVASNWYNRQIERSSRTLGCSWEFIPVDDGWGERPL

SEQ ID NO: 12 - protein, 1296 aa, Artificial Sequence
  Synthetic
MPFVNKQFNYKDPVNGVDIAYIKIPNAGQMQPVKAFKIHNKIWVIPERDTFTNPEEGDLNPPPEAKQVPVSYYDSTYLSTDNEKDNYLKGVTKLFERIYSTDLGRMLLTSIVRGIPFWGGSTIDTELKVIDTNCINVIQPDGSYRSEELNLVIIGPSADIIQFECKSFGHEVLNLTRNGYGSTQYIRFSPDFTFGFEESLEVDTNPLLGAGKFATDPAVTLAHELIHAGHRLYGIAINPNRVFKVNTNAYYEMSGLEVSFEELRTFGGHDAKFIDSLQENEFRLYYYNKFKDIASTLNKAKSIVGTTASLQYMKNVFKEKYLLSEDTSGKFSVDKLKFDRLYKMLTEIYTEDNFVKFFKVLNRKTYLNFDKAVFKINIVPKVNYTIYDGFNLRNTNLAANFNGQNTEINNMNFTKLKNFTGLFEFYKLLCVRGIITSKTKSLDKGYNKALNDLCIKVNNWDLFFSPSEDNFTNDLNKGEEITSDTNIEAAEENISLDLIQQYYLTFNFDNEPENISIENLSSDIIGQLELMPNIERFPNGKKYELDKYTMFHYLRAQEFEHGKSRIALTNSVNEALLNPSRVYTFFSSDYVKKVNKATEAAMFLGWVEQLVYDFTDETSEVSTTDKIADITIIIPYIGPALNIGNMLYKDDFVGALIFSGAVILLEFIPEIAIPVLGTFALVSYIANKVLTVQTIDNALSKRNEKWDEVYKYIVTNWLAKVNTQIDLIRKKMKEALENQAEATKAIINYQYNQYTEEEKNNINFNIDDLSSKLNESINKAMININKFLNQCSVSYLMNSMIPYGVKRLEDFDASLKDALLKYIYDNRGTLIGQVDRLKDKVNNTLSTDIPFQLSKYVDNQRLLSTFTEYIKNIINTSILNLRYESNHLIDLSRYASKINIGSKVNFDPIDKNQIQLFNLESSKIEVILKNAIVYNSMYENFSTSFWIRIPKYFNSISLNNEYTIINCMENNSGWKVSLNYGEIIWTLQDTQEIKQRVVFKYSQMINISDYINRWIFVTITNNRLNNSKIYINGRLIDQKPISNLGNIHASNNIMFKLDGCRDTHRYIWIKYFNLFDKELNEKEIKDLYDNQSNSGILKDFWGDYLQYDKPYYMLNLYDPNKYVDVNNVGIRGYMYLKGPRGSVMTTNIYLNSSLYRGTKFIIKKYASGNKDNIVRNNDRVYINVVVKNKEYRLATNASQAGVEKILSALEIPDVGNLSQVVVMKSKNDQGITNKCKMNLQDNNGNDIGFIGFHQFNNIAKLVASNWYNRQIERSSRTLGCSWEFIPVDDGWGERPL

SEQ ID NO: 13 - protein, 1296 aa, Artificial Sequence
  Synthetic
MPFVNKQFNYKDPVNGVDIAYIKIPNAGQMQPVKAFKIHNKIWVIPERDTFTNPEEGDLNPPPEAKQVPVSYYDSTYLSTDNEKDNYLKGVTKLFERIYSTDLGRMLLTSIVRGIPFWGGSTIDTELKVIDTNCINVIQPDGSYRSEELNLVIIGPSADIIQFECKSFGHEVLNLTRNGYGSTQYIRFSPDFTFGFEESLEVDTNPLLGAGKFATDPAVTLAHELIHAGHRLYGIAINPNRVFKVNTNAYYEMSGLEVSFEELRTFGGHDAKFIDSLQENEFRLYYYNKFKDIASTLNKAKSIVGTTASLQYMKNVFKEKYLLSEDTSGKFSVDKLKFDKLYRMLTEIYTEDNFVKFFKVLNRKTYLNFDKAVFKINIVPKVNYTIYDGFNLRNTNLAANFNGQNTEINNMNFTKLKNFTGLFEFYKLLCVRGIITSKTKSLDKGYNKALNDLCIKVNNWDLFFSPSEDNFTNDLNKGEEITSDTNIEAAEENISLDLIQQYYLTFNFDNEPENISIENLSSDIIGQLELMPNIERFPNGKKYELDKYTMFHYLRAQEFEHGKSRIALTNSVNEALLNPSRVYTFFSSDYVKKVNKATEAAMFLGWVEQLVYDFTDETSEVSTTDKIADITIIIPYIGPALNIGNMLYKDDFVGALIFSGAVILLEFIPEIAIPVLGTFALVSYIANKVLTVQTIDNALSKRNEKWDEVYKYIVTNWLAKVNTQIDLIRKKMKEALENQAEATKAIINYQYNQYTEEEKNNINFNIDDLSSKLNESINKAMININKFLNQCSVSYLMNSMIPYGVKRLEDFDASLKDALLKYIYDNRGTLIGQVDRLKDKVNNTLSTDIPFQLSKYVDNQRLLSTFTEYIKNIINTSILNLRYESNHLIDLSRYASKINIGSKVNFDPIDKNQIQLFNLESSKIEVILKNAIVYNSMYENFSTSFWIRIPKYFNSISLNNEYTIINCMENNSGWKVSLNYGEIIWTLQDTQEIKQRVVFKYSQMINISDYINRWIFVTITNNRLNNSKIYINGRLIDQKPISNLGNIHASNNIMFKLDGCRDTHRYIWIKYFNLFDKELNEKEIKDLYDNQSNSGILKDFWGDYLQYDKPYYMLNLYDPNKYVDVNNVGIRGYMYLKGPRGSVMTTNIYLNSSLYRGTKFIIKKYASGNKDNIVRNNDRVYINVVVKNKEYRLATNASQAGVEKILSALEIPDVGNLSQVVVMKSKNDQGITNKCKMNLQDNNGNDIGFIGFHQFNNIAKLVASNWYNRQIERSSRTLGCSWEFIPVDDGWGERPL

SEQ ID NO: 14 - protein, 1296 aa, Artificial Sequence
  Synthetic
MPFVNKQFNYKDPVNGVDIAYIKIPNAGQMQPVKAFKIHNKIWVIPERDTFTNPEEGDLNPPPEAKQVPVSYYDSTYLSTDNEKDNYLKGVTKLFERIYSTDLGRMLLTSIVRGIPFWGGSTIDTELKVIDTNCINVIQPDGSYRSEELNLVIIGPSADIIQFECKSFGHEVLNLTRNGYGSTQYIRFSPDFTFGFEESLEVDTNPLLGAGKFATDPAVTLAHELIHAGHRLYGIAINPNRVFKVNTNAYYEMSGLEVSFEELRTFGGHDAKFIDSLQENEFRLYYYNKFKDIASTLNKAKSIVGTTASLQYMKNVFKEKYLLSEDTSGKFSVDKLKFDKLYKMLTEIYTEDNFVRFFKVLNRKTYLNFDKAVFKINIVPKVNYTIYDGFNLRNTNLAANFNGQNTEINNMNFTKLKNFTGLFEFYKLLCVRGIITSKTKSLDKGYNKALNDLCIKVNNWDLFFSPSEDNFTNDLNKGEEITSDTNIEAAEENISLDLIQQYYLTFNFDNEPENISIENLSSDIIGQLELMPNIERFPNGKKYELDKYTMFHYLRAQEFEHGKSRIALTNSVNEALLNPSRVYTFFSSDYVKKVNKATEAAMFLGWVEQLVYDFTDETSEVSTTDKIADITIIIPYIGPALNIGNMLYKDDFVGALIFSGAVILLEFIPEIAIPVLGTFALVSYIANKVLTVQTIDNALSKRNEKWDEVYKYIVTNWLAKVNTQIDLIRKKMKEALENQAEATKAIINYQYNQYTEEEKNNINFNIDDLSSKLNESINKAMININKFLNQCSVSYLMNSMIPYGVKRLEDFDASLKDALLKYIYDNRGTLIGQVDRLKDKVNNTLSTDIPFQLSKYVDNQRLLSTFTEYIKNIINTSILNLRYESNHLIDLSRYASKINIGSKVNFDPIDKNQIQLFNLESSKIEVILKNAIVYNSMYENFSTSFWIRIPKYFNSISLNNEYTIINCMENNSGWKVSLNYGEIIWTLQDTQEIKQRVVFKYSQMINISDYINRWIFVTITNNRLNNSKIYINGRLIDQKPISNLGNIHASNNIMFKLDGCRDTHRYIWIKYFNLFDKELNEKEIKDLYDNQSNSGILKDFWGDYLQYDKPYYMLNLYDPNKYVDVNNVGIRGYMYLKGPRGSVMTTNIYLNSSLYRGTKFIIKKYASGNKDNIVRNNDRVYINVVVKNKEYRLATNASQAGVEKILSALEIPDVGNLSQVVVMKSKNDQGITNKCKMNLQDNNGNDIGFIGFHQFNNIAKLVASNWYNRQIERSSRTLGCSWEFIPVDDGWGERPL

SEQ ID NO: 15 - protein, 1296 aa, Artificial Sequence
  Synthetic
MPFVNKQFNYKDPVNGVDIAYIKIPNAGQMQPVKAFKIHNKIWVIPERDTFTNPEEGDLNPPPEAKQVPVSYYDSTYLSTDNEKDNYLKGVTKLFERIYSTDLGRMLLTSIVRGIPFWGGSTIDTELKVIDTNCINVIQPDGSYRSEELNLVIIGPSADIIQFECKSFGHEVLNLTRNGYGSTQYIRFSPDFTFGFEESLEVDTNPLLGAGKFATDPAVTLAHELIHAGHRLYGIAINPNRVFKVNTNAYYEMSGLEVSFEELRTFGGHDAKFIDSLQENEFRLYYYNKFKDIASTLNKAKSIVGTTASLQYMKNVFKEKYLLSEDTSGKFSVDKLKFDKLYKMLTEIYTEDNFVKFFKVLNRKTYLNFDKAVFRINIVPKVNYTIYDGFNLRNTNLAANFNGQNTEINNMNFTKLKNFTGLFEFYKLLCVRGIITSKTKSLDKGYNKALNDLCIKVNNWDLFFSPSEDNFTNDLNKGEEITSDTNIEAAEENISLDLIQQYYLTFNFDNEPENISIENLSSDIIGQLELMPNIERFPNGKKYELDKYTMFHYLRAQEFEHGKSRIALTNSVNEALLNPSRVYTFFSSDYVKKVNKATEAAMFLGWVEQLVYDFTDETSEVSTTDKIADITIIIPYIGPALNIGNMLYKDDFVGALIFSGAVILLEFIPEIAIPVLGTFALVSYIANKVLTVQTIDNALSKRNEKWDEVYKYIVTNWLAKVNTQIDLIRKKMKEALENQAEATKAIINYQYNQYTEEEKNNINFNIDDLSSKLNESINKAMININKFLNQCSVSYLMNSMIPYGVKRLEDFDASLKDALLKYIYDNRGTLIGQVDRLKDKVNNTLSTDIPFQLSKYVDNQRLLSTFTEYIKNIINTSILNLRYESNHLIDLSRYASKINIGSKVNFDPIDKNQIQLFNLESSKIEVILKNAIVYNSMYENFSTSFWIRIPKYFNSISLNNEYTIINCMENNSGWKVSLNYGEIIWTLQDTQEIKQRVVFKYSQMINISDYINRWIFVTITNNRLNNSKIYINGRLIDQKPISNLGNIHASNNIMFKLDGCRDTHRYIWIKYFNLFDKELNEKEIKDLYDNQSNSGILKDFWGDYLQYDKPYYMLNLYDPNKYVDVNNVGIRGYMYLKGPRGSVMTTNIYLNSSLYRGTKFIIKKYASGNKDNIVRNNDRVYINVVVKNKEYRLATNASQAGVEKILSALEIPDVGNLSQVVVMKSKNDQGITNKCKMNLQDNNGNDIGFIGFHQFNNIAKLVASNWYNRQIERSSRTLGCSWEFIPVDDGWGERPL

SEQ ID NO: 16 - protein, 1296 aa, Artificial Sequence
  Synthetic
MPFVNKQFNYKDPVNGVDIAYIKIPNAGQMQPVKAFKIHNKIWVIPERDTFTNPEEGDLNPPPEAKQVPVSYYDSTYLSTDNEKDNYLKGVTKLFERIYSTDLGRMLLTSIVRGIPFWGGSTIDTELKVIDTNCINVIQPDGSYRSEELNLVIIGPSADIIQFECKSFGHEVLNLTRNGYGSTQYIRFSPDFTFGFEESLEVDTNPLLGAGKFATDPAVTLAHELIHAGHRLYGIAINPNRVFKVNTNAYYEMSGLEVSFEELRTFGGHDAKFIDSLQENEFRLYYYNKFKDIASTLNKAKSIVGTTASLQYMKNVFKEKYLLSEDTSGKFSVDKLKFDKLYKMLTEIYTEDNFVKFFKVLNRKTYLNFDKAVFKINIVPRVNYTIYDGFNLRNTNLAANFNGQNTEINNMNFTKLKNFTGLFEFYKLLCVRGIITSKTKSLDKGYNKALNDLCIKVNNWDLFFSPSEDNFTNDLNKGEEITSDTNIEAAEENISLDLIQQYYLTFNFDNEPENISIENLSSDIIGQLELMPNIERFPNGKKYELDKYTMFHYLRAQEFEHGKSRIALTNSVNEALLNPSRVYTFFSSDYVKKVNKATEAAMFLGWVEQLVYDFTDETSEVSTTDKIADITIIIPYIGPALNIGNMLYKDDFVGALIFSGAVILLEFIPEIAIPVLGTFALVSYIANKVLTVQTIDNALSKRNEKWDEVYKYIVTNWLAKVNTQIDLIRKKMKEALENQAEATKAIINYQYNQYTEEEKNNINFNIDDLSSKLNESINKAMININKFLNQCSVSYLMNSMIPYGVKRLEDFDASLKDALLKYIYDNRGTLIGQVDRLKDKVNNTLSTDIPFQLSKYVDNQRLLSTFTEYIKNIINTSILNLRYESNHLIDLSRYASKINIGSKVNFDPIDKNQIQLFNLESSKIEVILKNAIVYNSMYENFSTSFWIRIPKYFNSISLNNEYTIINCMENNSGWKVSLNYGEIIWTLQDTQEIKQRVVFKYSQMINISDYINRWIFVTITNNRLNNSKIYINGRLIDQKPISNLGNIHASNNIMFKLDGCRDTHRYIWIKYFNLFDKELNEKEIKDLYDNQSNSGILKDFWGDYLQYDKPYYMLNLYDPNKYVDVNNVGIRGYMYLKGPRGSVMTTNIYLNSSLYRGTKFIIKKYASGNKDNIVRNNDRVYINVVVKNKEYRLATNASQAGVEKILSALEIPDVGNLSQVVVMKSKNDQGITNKCKMNLQDNNGNDIGFIGFHQFNNIAKLVASNWYNRQIERSSRTLGCSWEFIPVDDGWGERPL

SEQ ID NO: 17 - protein, 1296 aa, Artificial Sequence
  Synthetic
MPFVNKQFNYKDPVNGVDIAYIKIPNAGQMQPVKAFKIHNKIWVIPERDTFTNPEEGDLNPPPEAKQVPVSYYDSTYLSTDNEKDNYLKGVTKLFERIYSTDLGRMLLTSIVRGIPFWGGSTIDTELKVIDTNCINVIQPDGSYRSEELNLVIIGPSADIIQFECKSFGHEVLNLTRNGYGSTQYIRFSPDFTFGFEESLEVDTNPLLGAGKFATDPAVTLAHELIHAGHRLYGIAINPNRVFKVNTNAYYEMSGLEVSFEELRTFGGHDAKFIDSLQENEFRLYYYNKFKDIASTLNKAKSIVGTTASLQYMKNVFKEKYLLSEDTSGKFSVDKLKFDKLYKMLTEIYTEDNFVKFFKVLNRKTYLNFDKAVFKINIVPKVNYTIRDGFNLRNTNLAANFNGQNTEINNMNFTKLKNFTGLFEFYKLLCVRGIITSKTKSLDKGYNKALNDLCIKVNNWDLFFSPSEDNFTNDLNKGEEITSDTNIEAAEENISLDLIQQYYLTFNFDNEPENISIENLSSDIIGQLELMPNIERFPNGKKYELDKYTMFHYLRAQEFEHGKSRIALTNSVNEALLNPSRVYTFFSSDYVKKVNKATEAAMFLGWVEQLVYDFTDETSEVSTTDKIADITIIIPYIGPALNIGNMLYKDDFVGALIFSGAVILLEFIPEIAIPVLGTFALVSYIANKVLTVQTIDNALSKRNEKWDEVYKYIVTNWLAKVNTQIDLIRKKMKEALENQAEATKAIINYQYNQYTEEEKNNINFNIDDLSSKLNESINKAMININKFLNQCSVSYLMNSMIPYGVKRLEDFDASLKDALLKYIYDNRGTLIGQVDRLKDKVNNTLSTDIPFQLSKYVDNQRLLSTFTEYIKNIINTSILNLRYESNHLIDLSRYASKINIGSKVNFDPIDKNQIQLFNLESSKIEVILKNAIVYNSMYENFSTSFWIRIPKYFNSISLNNEYTIINCMENNSGWKVSLNYGEIIWTLQDTQEIKQRVVFKYSQMINISDYINRWIFVTITNNRLNNSKIYINGRLIDQKPISNLGNIHASNNIMFKLDGCRDTHRYIWIKYFNLFDKELNEKEIKDLYDNQSNSGILKDFWGDYLQYDKPYYMLNLYDPNKYVDVNNVGIRGYMYLKGPRGSVMTTNIYLNSSLYRGTKFIIKKYASGNKDNIVRNNDRVYINVVVKNKEYRLATNASQAGVEKILSALEIPDVGNLSQVVVMKSKNDQGITNKCKMNLQDNNGNDIGFIGFHQFNNIAKLVASNWYNRQIERSSRTLGCSWEFIPVDDGWGERPL

SEQ ID NO: 18 - protein, 1296 aa, Artificial Sequence
  Synthetic
MPFVNKQFNYKDPVNGVDIAYIKIPNAGQMQPVKAFKIHNKIWVIPERDTFTNPEEGDLNPPPEAKQVPVSYYDSTYLSTDNEKDNYLKGVTKLFERIYSTDLGRMLLTSIVRGIPFWGGSTIDTELKVIDTNCINVIQPDGSYRSEELNLVIIGPSADIIQFECKSFGHEVLNLTRNGYGSTQYIRFSPDFTFGFEESLEVDTNPLLGAGKFATDPAVTLAHELIHAGHRLYGIAINPNRVFKVNTNAYYEMSGLEVSFEELRTFGGHDAKFIDSLQENEFRLYYYNKFKDIASTLNKAKSIVGTTASLQYMKNVFKEKYLLSEDTSGKFSVDKLKFDKLYKMLTEIYTEDNFVKFFKVLNRKTYLNFDKAVFKINIVPKVNYTIYDGFNLRNTNLAANFNGQNTEINNRNFTKLKNFTGLFEFYKLLCVRGIITSKTKSLDKGYNKALNDLCIKVNNWDLFFSPSEDNFTNDLNKGEEITSDTNIEAAEENISLDLIQQYYLTFNFDNEPENISIENLSSDIIGQLELMPNIERFPNGKKYELDKYTMFHYLRAQEFEHGKSRIALTNSVNEALLNPSRVYTFFSSDYVKKVNKATEAAMFLGWVEQLVYDFTDETSEVSTTDKIADITIIIPYIGPALNIGNMLYKDDFVGALIFSGAVILLEFIPEIAIPVLGTFALVSYIANKVLTVQTIDNALSKRNEKWDEVYKYIVTNWLAKVNTQIDLIRKKMKEALENQAEATKAIINYQYNQYTEEEKNNINFNIDDLSSKLNESINKAMININKFLNQCSVSYLMNSMIPYGVKRLEDFDASLKDALLKYIYDNRGTLIGQVDRLKDKVNNTLSTDIPFQLSKYVDNQRLLSTFTEYIKNIINTSILNLRYESNHLIDLSRYASKINIGSKVNFDPIDKNQIQLFNLESSKIEVILKNAIVYNSMYENFSTSFWIRIPKYFNSISLNNEYTIINCMENNSGWKVSLNYGEIIWTLQDTQEIKQRVVFKYSQMINISDYINRWIFVTITNNRLNNSKIYINGRLIDQKPISNLGNIHASNNIMFKLDGCRDTHRYIWIKYFNLFDKELNEKEIKDLYDNQSNSGILKDFWGDYLQYDKPYYMLNLYDPNKYVDVNNVGIRGYMYLKGPRGSVMTTNIYLNSSLYRGTKFIIKKYASGNKDNIVRNNDRVYINVVVKNKEYRLATNASQAGVEKILSALEIPDVGNLSQVVVMKSKNDQGITNKCKMNLQDNNGNDIGFIGFHQFNNIAKLVASNWYNRQIERSSRTLGCSWEFIPVDDGWGERPL

SEQ ID NO: 19 - protein, 1296 aa, Artificial Sequence
  Synthetic
MPFVNKQFNYKDPVNGVDIAYIKIPNAGQMQPVKAFKIHNKIWVIPERDTFTNPEEGDLNPPPEAKQVPVSYYDSTYLSTDNEKDNYLKGVTKLFERIYSTDLGRMLLTSIVRGIPFWGGSTIDTELKVIDTNCINVIQPDGSYRSEELNLVIIGPSADIIQFECKSFGHEVLNLTRNGYGSTQYIRFSPDFTFGFEESLEVDTNPLLGAGKFATDPAVTLAHELIHAGHRLYGIAINPNRVFKVNTNAYYEMSGLEVSFEELRTFGGHDAKFIDSLQENEFRLYYYNKFKDIASTLNKAKSIVGTTASLQYMKNVFKEKYLLSEDTSGKFSVDKLKFDKLYKMLTEIYTEDNFVKFFKVLNRKTYLNFDKAVFKINIVPKVNYTIYDGFNLRNTNLAANFNGQNTEINNMNFTRLKNFTGLFEFYKLLCVRGIITSKTKSLDKGYNKALNDLCIKVNNWDLFFSPSEDNFTNDLNKGEEITSDTNIEAAEENISLDLIQQYYLTFNFDNEPENISIENLSSDIIGQLELMPNIERFPNGKKYELDKYTMFHYLRAQEFEHGKSRIALTNSVNEALLNPSRVYTFFSSDYVKKVNKATEAAMFLGWVEQLVYDFTDETSEVSTTDKIADITIIIPYIGPALNIGNMLYKDDFVGALIFSGAVILLEFIPEIAIPVLGTFALVSYIANKVLTVQTIDNALSKRNEKWDEVYKYIVTNWLAKVNTQIDLIRKKMKEALENQAEATKAIINYQYNQYTEEEKNNINFNIDDLSSKLNESINKAMININKFLNQCSVSYLMNSMIPYGVKRLEDFDASLKDALLKYIYDNRGTLIGQVDRLKDKVNNTLSTDIPFQLSKYVDNQRLLSTFTEYIKNIINTSILNLRYESNHLIDLSRYASKINIGSKVNFDPIDKNQIQLFNLESSKIEVILKNAIVYNSMYENFSTSFWIRIPKYFNSISLNNEYTIINCMENNSGWKVSLNYGEIIWTLQDTQEIKQRVVFKYSQMINISDYINRWIFVTITNNRLNNSKIYINGRLIDQKPISNLGNIHASNNIMFKLDGCRDTHRYIWIKYFNLFDKELNEKEIKDLYDNQSNSGILKDFWGDYLQYDKPYYMLNLYDPNKYVDVNNVGIRGYMYLKGPRGSVMTTNIYLNSSLYRGTKFIIKKYASGNKDNIVRNNDRVYINVVVKNKEYRLATNASQAGVEKILSALEIPDVGNLSQVVVMKSKNDQGITNKCKMNLQDNNGNDIGFIGFHQFNNIAKLVASNWYNRQIERSSRTLGCSWEFIPVDDGWGERPL

SEQ ID NO: 20 - protein, 1296 aa, Artificial Sequence
  Synthetic
MPFVNKQFNYRDPVNGVDIAYIKIPNAGQMQPVKAFKIHNKIWVIPERDTFTNPEEGDLNPPPEAKQVPVSYYDSTYLSTDNEKDNYLKGVTKLFERIYSTDLGRMLLTSIVRGIPFWGGSTIDTELKVIDTNCINVIQPDGSYRSEELNLVIIGPSADIIQFECKSFGHEVLNLTRNGYGSTQYIRFSPDFTFGFEESLEVDTNPLLGAGKFATDPAVTLAHELIHAGHRLYGIAINPNRVFKVNTNAYYEMSGLEVSFEELRTFGGHDAKFIDSLQENEFRLYYYNKFKDIASTLNKAKSIVGTTASLQYMKNVFKEKYLLSEDTSGKFSVDRLRFDKLYRMLTEIYTEDNFVKFFKVLNRKTYLNFDKAVFRINIVPKVNYTIYDGFNLRNTNLAANFNGQNTEINNMNFTRLKNFTGLFEFYKLLCVRGIITSKTKSLDKGYNKALNDLCIKVNNWDLFFSPSEDNFTNDLNKGEEITSDTNIEAAEENISLDLIQQYYLTFNFDNEPENISIENLSSDIIGQLELMPNIERFPNGKKYELDKYTMFHYLRAQEFEHGKSRIALTNSVNEALLNPSRVYTFFSSDYVKKVNKATEAAMFLGWVEQLVYDFTDETSEVSTTDKIADITIIIPYIGPALNIGNMLYKDDFVGALIFSGAVILLEFIPEIAIPVLGTFALVSYIANKVLTVQTIDNALSKRNEKWDEVYKYIVTNWLAKVNTQIDLIRKKMKEALENQAEATKAIINYQYNQYTEEEKNNINFNIDDLSSKLNESINKAMININKFLNQCSVSYLMNSMIPYGVKRLEDFDASLKDALLKYIYDNRGTLIGQVDRLKDKVNNTLSTDIPFQLSKYVDNQRLLSTFTEYIKNIINTSILNLRYESNHLIDLSRYASKINIGSKVNFDPIDKNQIQLFNLESSKIEVILKNAIVYNSMYENFSTSFWIRIPKYFNSISLNNEYTIINCMENNSGWKVSLNYGEIIWTLQDTQEIKQRVVFKYSQMINISDYINRWIFVTITNNRLNNSKIYINGRLIDQKPISNLGNIHASNNIMFKLDGCRDTHRYIWIKYFNLFDKELNEKEIKDLYDNQSNSGILKDFWGDYLQYDKPYYMLNLYDPNKYVDVNNVGIRGYMYLKGPRGSVMTTNIYLNSSLYRGTKFIIKKYASGNKDNIVRNNDRVYINVVVKNKEYRLATNASQAGVEKILSALEIPDVGNLSQVVVMKSKNDQGITNKCKMNLQDNNGNDIGFIGFHQFNNIAKLVASNWYNRQIERSSRTLGCSWEFIPVDDGWGERPL

SEQ ID NO: 21 - protein, 1296 aa, Artificial Sequence
  Synthetic
MPFVNKQFNYKDPVNGVDIAYIKIPNAGQMQPVKAFKIHNRIWVIPERDTFTNPEEGDLNPPPEAKQVPVSYYDSTYLSTDNEKDNYLKGVTKLFERIYSTDLGRMLLTSIVRGIPFWGGSTIDTELKVIDTNCINVIQPDGSYRSEELNLVIIGPSADIIQFECKSFGHEVLNLTRNGYGSTQYIRFSPDFTFGFEESLEVDTNPLLGAGKFATDPAVTLAHELIHAGHRLYGIAINPNRVFKVNTNAYYEMSGLEVSFEELRTFGGHDAKFIDSLQENEFRLYYYNKFKDIASTLNKAKSIVGTTASLQYMKNVFREKYLLSEDTSGKFSVDKLKFDRLYKMLTEIYTEDNFVKFFKVLNRKTYLNFDKAVFKINIVPKVNYTIYDGFNLRNTNLAANFNGQNTEINNMNFTKLKNFTGLFEFYKLLCVRGIITSKTKSLDKGYNKALNDLCIKVNNWDLFFSPSEDNFTNDLNKGEEITSDTNIEAAEENISLDLIQQYYLTFNFDNEPENISIENLSSDIIGQLELMPNIERFPNGKKYELDKYTMFHYLRAQEFEHGKSRIALTNSVNEALLNPSRVYTFFSSDYVKKVNKATEAAMFLGWVEQLVYDFTDETSEVSTTDKIADITIIIPYIGPALNIGNMLYKDDFVGALIFSGAVILLEFIPEIAIPVLGTFALVSYIANKVLTVQTIDNALSKRNEKWDEVYKYIVTNWLAKVNTQIDLIRKKMKEALENQAEATKAIINYQYNQYTEEEKNNINFNIDDLSSKLNESINKAMININKFLNQCSVSYLMNSMIPYGVKRLEDFDASLKDALLKYIYDNRGTLIGQVDRLKDKVNNTLSTDIPFQLSKYVDNQRLLSTFTEYIKNIINTSILNLRYESNHLIDLSRYASKINIGSKVNFDPIDKNQIQLFNLESSKIEVILKNAIVYNSMYENFSTSFWIRIPKYFNSISLNNEYTIINCMENNSGWKVSLNYGEIIWTLQDTQEIKQRVVFKYSQMINISDYINRWIFVTITNNRLNNSKIYINGRLIDQKPISNLGNIHASNNIMFKLDGCRDTHRYIWIKYFNLFDKELNEKEIKDLYDNQSNSGILKDFWGDYLQYDKPYYMLNLYDPNKYVDVNNVGIRGYMYLKGPRGSVMTTNIYLNSSLYRGTKFIIKKYASGNKDNIVRNNDRVYINVVVKNKEYRLATNASQAGVEKILSALEIPDVGNLSQVVVMKSKNDQGITNKCKMNLQDNNGNDIGFIGFHQFNNIAKLVASNWYNRQIERSSRTLGCSWEFIPVDDGWGERPL

SEQ ID NO: 22 - protein, 1296 aa, Artificial Sequence
  Synthetic
MPFVNKQFNYKDPVNGVDIAYIKIPNAGQMQPVKAFKIHNKIWVIPERDTFTNPEEGDLNPPPEAKQVPVSYYDSTYLSTDNEKDNYLKGVTKLFERIYSTDLGRMLLTSIVRGIPFWGGSTIDTELKVIDTNCINVIQPDGSYRSEELNLVIIGPSADIIQFECKSFGHEVLNLTRNGYGSTQYIRFSPDFTFGFEESLEVDTNPLLGAGKFATDPAVTLAHELIHAGHRLYGIAINPNRVFKVNTNAYYEMSGLEVSFEELRTFGGHDAKFIDSLQENEFRLYYYNRFRDIASTLNRAKSIVGTTASLQYMKNVFKEKYLLSEDTSGKFSVDKLKFDKLYKMLTEIYTEDNFVKFFKVLNRKTYLNFDKAVFKINIVPRVNYTIYDGFNLRNTNLAANFNGQNTEINNMNFTKLKNFTGLFEFYKLLCVRGIITSKTKSLDKGYNKALNDLCIKVNNWDLFFSPSEDNFTNDLNKGEEITSDTNIEAAEENISLDLIQQYYLTFNFDNEPENISIENLSSDIIGQLELMPNIERFPNGKKYELDKYTMFHYLRAQEFEHGKSRIALTNSVNEALLNPSRVYTFFSSDYVKKVNKATEAAMFLGWVEQLVYDFTDETSEVSTTDKIADITIIIPYIGPALNIGNMLYKDDFVGALIFSGAVILLEFIPEIAIPVLGTFALVSYIANKVLTVQTIDNALSKRNEKWDEVYKYIVTNWLAKVNTQIDLIRKKMKEALENQAEATKAIINYQYNQYTEEEKNNINFNIDDLSSKLNESINKAMININKFLNQCSVSYLMNSMIPYGVKRLEDFDASLKDALLKYIYDNRGTLIGQVDRLKDKVNNTLSTDIPFQLSKYVDNQRLLSTFTEYIKNIINTSILNLRYESNHLIDLSRYASKINIGSKVNFDPIDKNQIQLFNLESSKIEVILKNAIVYNSMYENFSTSFWIRIPKYFNSISLNNEYTIINCMENNSGWKVSLNYGEIIWTLQDTQEIKQRVVFKYSQMINISDYINRWIFVTITNNRLNNSKIYINGRLIDQKPISNLGNIHASNNIMFKLDGCRDTHRYIWIKYFNLFDKELNEKEIKDLYDNQSNSGILKDFWGDYLQYDKPYYMLNLYDPNKYVDVNNVGIRGYMYLKGPRGSVMTTNIYLNSSLYRGTKFIIKKYASGNKDNIVRNNDRVYINVVVKNKEYRLATNASQAGVEKILSALEIPDVGNLSQVVVMKSKNDQGITNKCKMNLQDNNGNDIGFIGFHQFNNIAKLVASNWYNRQIERSSRTLGCSWEFIPVDDGWGERPL

SEQ ID NO: 23 - protein, 1296 aa, Artificial Sequence
  Synthetic
MPFVNKQFNYKDPVNGVDIAYIKIPNAGQMQPVKAFKIHNKIWVIPERDTFTNPEEGDLNPPPEAKQVPVSYYDSTYLSTDNEKDNYLKGVTKLFERIYSTDLGRMLLTSIVRGIPFWGGSTIDTELKVIDTNCINVIQPDGSYRSEELNLVIIGPSADIIQFECKSFGHEVLNLTRNGYGSTQYIRFSPDFTFGFEESLEVDTNPLLGAGRFATDPAVTLAHELIHAGHRLYGIAINPNRVFKVNTNAYYEMSGLEVSFEELRTFGGHDARFIDSLQENEFRLYYYNKFKDIASTLNKAKSIVGTTASLQYMKNVFKEKYLLSEDTSGKFSVDKLKFDKLYKMLTEIYTEDNFVRFFKVLNRKTYLNFDKAVFKINIVPKVNYTIYDGFNLRNTNLAANFNGQNTEINNMNFTKLKNFTGLFEFYKLLCVRGIITSKTKSLDKGYNKALNDLCIKVNNWDLFFSPSEDNFTNDLNKGEEITSDTNIEAAEENISLDLIQQYYLTFNFDNEPENISIENLSSDIIGQLELMPNIERFPNGKKYELDKYTMFHYLRAQEFEHGKSRIALTNSVNEALLNPSRVYTFFSSDYVKKVNKATEAAMFLGWVEQLVYDFTDETSEVSTTDKIADITIIIPYIGPALNIGNMLYKDDFVGALIFSGAVILLEFIPEIAIPVLGTFALVSYIANKVLTVQTIDNALSKRNEKWDEVYKYIVTNWLAKVNTQIDLIRKKMKEALENQAEATKAIINYQYNQYTEEEKNNINFNIDDLSSKLNESINKAMININKFLNQCSVSYLMNSMIPYGVKRLEDFDASLKDALLKYIYDNRGTLIGQVDRLKDKVNNTLSTDIPFQLSKYVDNQRLLSTFTEYIKNIINTSILNLRYESNHLIDLSRYASKINIGSKVNFDPIDKNQIQLFNLESSKIEVILKNAIVYNSMYENFSTSFWIRIPKYFNSISLNNEYTIINCMENNSGWKVSLNYGEIIWTLQDTQEIKQRVVFKYSQMINISDYINRWIFVTITNNRLNNSKIYINGRLIDQKPISNLGNIHASNNIMFKLDGCRDTHRYIWIKYFNLFDKELNEKEIKDLYDNQSNSGILKDFWGDYLQYDKPYYMLNLYDPNKYVDVNNVGIRGYMYLKGPRGSVMTTNIYLNSSLYRGTKFIIKKYASGNKDNIVRNNDRVYINVVVKNKEYRLATNASQAGVEKILSALEIPDVGNLSQVVVMKSKNDQGITNKCKMNLQDNNGNDIGFIGFHQFNNIAKLVASNWYNRQIERSSRTLGCSWEFIPVDDGWGERPL

SEQ ID NO: 24 - protein, 1296 aa, Artificial Sequence
  Synthetic
MPFVNKQFNYRDPVNGVDIAYIKIPNAGQMQPVKAFKIHNRIWVIPERDTFTNPEEGDLNPPPEAKQVPVSYYDSTYLSTDNEKDNYLKGVTKLFERIYSTDLGRMLLTSIVRGIPFWGGSTIDTELKVIDTNCINVIQPDGSYRSEELNLVIIGPSADIIQFECKSFGHEVLNLTRNGYGSTQYIRFSPDFTFGFEESLEVDTNPLLGAGKFATDPAVTLAHELIHAGHRLYGIAINPNRVFKVNTNAYYEMSGLEVSFEELRTFGGHDAKFIDSLQENEFRLYYYNKFKDIASTLNKAKSIVGTTASLQYMKNVFREKYLLSEDTSGKFSVDRLRFDRLYRMLTEIYTEDNFVKFFKVLNRKTYLNFDKAVFRINIVPKVNYTIYDGFNLRNTNLAANFNGQNTEINNMNFTRLKNFTGLFEFYKLLCVRGIITSKTKSLDKGYNKALNDLCIKVNNWDLFFSPSEDNFTNDLNKGEEITSDTNIEAAEENISLDLIQQYYLTFNFDNEPENISIENLSSDIIGQLELMPNIERFPNGKKYELDKYTMFHYLRAQEFEHGKSRIALTNSVNEALLNPSRVYTFFSSDYVKKVNKATEAAMFLGWVEQLVYDFTDETSEVSTTDKIADITIIIPYIGPALNIGNMLYKDDFVGALIFSGAVILLEFIPEIAIPVLGTFALVSYIANKVLTVQTIDNALSKRNEKWDEVYKYIVTNWLAKVNTQIDLIRKKMKEALENQAEATKAIINYQYNQYTEEEKNNINFNIDDLSSKLNESINKAMININKFLNQCSVSYLMNSMIPYGVKRLEDFDASLKDALLKYIYDNRGTLIGQVDRLKDKVNNTLSTDIPFQLSKYVDNQRLLSTFTEYIKNIINTSILNLRYESNHLIDLSRYASKINIGSKVNFDPIDKNQIQLFNLESSKIEVILKNAIVYNSMYENFSTSFWIRIPKYFNSISLNNEYTIINCMENNSGWKVSLNYGEIIWTLQDTQEIKQRVVFKYSQMINISDYINRWIFVTITNNRLNNSKIYINGRLIDQKPISNLGNIHASNNIMFKLDGCRDTHRYIWIKYFNLFDKELNEKEIKDLYDNQSNSGILKDFWGDYLQYDKPYYMLNLYDPNKYVDVNNVGIRGYMYLKGPRGSVMTTNIYLNSSLYRGTKFIIKKYASGNKDNIVRNNDRVYINVVVKNKEYRLATNASQAGVEKILSALEIPDVGNLSQVVVMKSKNDQGITNKCKMNLQDNNGNDIGFIGFHQFNNIAKLVASNWYNRQIERSSRTLGCSWEFIPVDDGWGERPL

SEQ ID NO: 25 - protein, 1296 aa, Artificial Sequence
  Synthetic
MPFVNKQFNYRDPVNGVDIAYIKIPNAGQMQPVKAFKIHNKIWVIPERDTFTNPEEGDLNPPPEAKQVPVSYYDSTYLSTDNEKDNYLKGVTKLFERIYSTDLGRMLLTSIVRGIPFWGGSTIDTELKVIDTNCINVIQPDGSYRSEELNLVIIGPSADIIQFECKSFGHEVLNLTRNGYGSTQYIRFSPDFTFGFEESLEVDTNPLLGAGKFATDPAVTLAHELIHAGHRLYGIAINPNRVFKVNTNAYYEMSGLEVSFEELRTFGGHDAKFIDSLQENEFRLYYYNRFRDIASTLNRAKSIVGTTASLQYMKNVFKEKYLLSEDTSGKFSVDRLRFDKLYRMLTEIYTEDNFVKFFKVLNRKTYLNFDKAVFRINIVPRVNYTIYDGFNLRNTNLAANFNGQNTEINNMNFTRLKNFTGLFEFYKLLCVRGIITSKTKSLDKGYNKALNDLCIKVNNWDLFFSPSEDNFTNDLNKGEEITSDTNIEAAEENISLDLIQQYYLTFNFDNEPENISIENLSSDIIGQLELMPNIERFPNGKKYELDKYTMFHYLRAQEFEHGKSRIALTNSVNEALLNPSRVYTFFSSDYVKKVNKATEAAMFLGWVEQLVYDFTDETSEVSTTDKIADITIIIPYIGPALNIGNMLYKDDFVGALIFSGAVILLEFIPEIAIPVLGTFALVSYIANKVLTVQTIDNALSKRNEKWDEVYKYIVTNWLAKVNTQIDLIRKKMKEALENQAEATKAIINYQYNQYTEEEKNNINFNIDDLSSKLNESINKAMININKFLNQCSVSYLMNSMIPYGVKRLEDFDASLKDALLKYIYDNRGTLIGQVDRLKDKVNNTLSTDIPFQLSKYVDNQRLLSTFTEYIKNIINTSILNLRYESNHLIDLSRYASKINIGSKVNFDPIDKNQIQLFNLESSKIEVILKNAIVYNSMYENFSTSFWIRIPKYFNSISLNNEYTIINCMENNSGWKVSLNYGEIIWTLQDTQEIKQRVVFKYSQMINISDYINRWIFVTITNNRLNNSKIYINGRLIDQKPISNLGNIHASNNIMFKLDGCRDTHRYIWIKYFNLFDKELNEKEIKDLYDNQSNSGILKDFWGDYLQYDKPYYMLNLYDPNKYVDVNNVGIRGYMYLKGPRGSVMTTNIYLNSSLYRGTKFIIKKYASGNKDNIVRNNDRVYINVVVKNKEYRLATNASQAGVEKILSALEIPDVGNLSQVVVMKSKNDQGITNKCKMNLQDNNGNDIGFIGFHQFNNIAKLVASNWYNRQIERSSRTLGCSWEFIPVDDGWGERPL

SEQ ID NO: 26 - protein, 1296 aa, Artificial Sequence
  Synthetic
MPFVNKQFNYRDPVNGVDIAYIKIPNAGQMQPVKAFKIHNRIWVIPERDTFTNPEEGDLNPPPEAKQVPVSYYDSTYLSTDNEKDNYLKGVTKLFERIYSTDLGRMLLTSIVRGIPFWGGSTIDTELKVIDTNCINVIQPDGSYRSEELNLVIIGPSADIIQFECKSFGHEVLNLTRNGYGSTQYIRFSPDFTFGFEESLEVDTNPLLGAGKFATDPAVTLAHELIHAGHRLYGIAINPNRVFKVNTNAYYEMSGLEVSFEELRTFGGHDAKFIDSLQENEFRLYYYNRFRDIASTLNRAKSIVGTTASLQYMKNVFKEKYLLSEDTSGKFSVDRLRFDKLYRMLTEIYTEDNFVKFFKVLNRKTYLNFDKAVFRINIVPRVNYTIYDGFNLRNTNLAANFNGQNTEINNMNFTRLKNFTGLFEFYKLLCVRGIITSKTKSLDKGYNKALNDLCIKVNNWDLFFSPSEDNFTNDLNKGEEITSDTNIEAAEENISLDLIQQYYLTFNFDNEPENISIENLSSDIIGQLELMPNIERFPNGKKYELDKYTMFHYLRAQEFEHGKSRIALTNSVNEALLNPSRVYTFFSSDYVKKVNKATEAAMFLGWVEQLVYDFTDETSEVSTTDKIADITIIIPYIGPALNIGNMLYKDDFVGALIFSGAVILLEFIPEIAIPVLGTFALVSYIANKVLTVQTIDNALSKRNEKWDEVYKYIVTNWLAKVNTQIDLIRKKMKEALENQAEATKAIINYQYNQYTEEEKNNINFNIDDLSSKLNESINKAMININKFLNQCSVSYLMNSMIPYGVKRLEDFDASLKDALLKYIYDNRGTLIGQVDRLKDKVNNTLSTDIPFQLSKYVDNQRLLSTFTEYIKNIINTSILNLRYESNHLIDLSRYASKINIGSKVNFDPIDKNQIQLFNLESSKIEVILKNAIVYNSMYENFSTSFWIRIPKYFNSISLNNEYTIINCMENNSGWKVSLNYGEIIWTLQDTQEIKQRVVFKYSQMINISDYINRWIFVTITNNRLNNSKIYINGRLIDQKPISNLGNIHASNNIMFKLDGCRDTHRYIWIKYFNLFDKELNEKEIKDLYDNQSNSGILKDFWGDYLQYDKPYYMLNLYDPNKYVDVNNVGIRGYMYLKGPRGSVMTTNIYLNSSLYRGTKFIIKKYASGNKDNIVRNNDRVYINVVVKNKEYRLATNASQAGVEKILSALEIPDVGNLSQVVVMKSKNDQGITNKCKMNLQDNNGNDIGFIGFHQFNNIAKLVASNWYNRQIERSSRTLGCSWEFIPVDDGWGERPL

SEQ ID NO: 27 - protein, 1296 aa, Artificial Sequence
  Synthetic
MPFVNKQFNYRDPVNGVDIAYIKIPNAGQMQPVKAFKIHNKIWVIPERDTFTNPEEGDLNPPPEAKQVPVSYYDSTYLSTDNEKDNYLKGVTKLFERIYSTDLGRMLLTSIVRGIPFWGGSTIDTELKVIDTNCINVIQPDGSYRSEELNLVIIGPSADIIQFECKSFGHEVLNLTRNGYGSTQYIRFSPDFTFGFEESLEVDTNPLLGAGRFATDPAVTLAHELIHAGHRLYGIAINPNRVFKVNTNAYYEMSGLEVSFEELRTFGGHDAKFIDSLQENEFRLYYYNRFRDIASTLNRAKSIVGTTASLQYMKNVFKEKYLLSEDTSGKFSVDRLRFDKLYRMLTEIYTEDNFVKFFKVLNRKTYLNFDKAVFRINIVPRVNYTIYDGFNLRNTNLAANFNGQNTEINNMNFTRLKNFTGLFEFYKLLCVRGIITSKTKSLDKGYNKALNDLCIKVNNWDLFFSPSEDNFTNDLNKGEEITSDTNIEAAEENISLDLIQQYYLTFNFDNEPENISIENLSSDIIGQLELMPNIERFPNGKKYELDKYTMFHYLRAQEFEHGKSRIALTNSVNEALLNPSRVYTFFSSDYVKKVNKATEAAMFLGWVEQLVYDFTDETSEVSTTDKIADITIIIPYIGPALNIGNMLYKDDFVGALIFSGAVILLEFIPEIAIPVLGTFALVSYIANKVLTVQTIDNALSKRNEKWDEVYKYIVTNWLAKVNTQIDLIRKKMKEALENQAEATKAIINYQYNQYTEEEKNNINFNIDDLSSKLNESINKAMININKFLNQCSVSYLMNSMIPYGVKRLEDFDASLKDALLKYIYDNRGTLIGQVDRLKDKVNNTLSTDIPFQLSKYVDNQRLLSTFTEYIKNIINTSILNLRYESNHLIDLSRYASKINIGSKVNFDPIDKNQIQLFNLESSKIEVILKNAIVYNSMYENFSTSFWIRIPKYFNSISLNNEYTIINCMENNSGWKVSLNYGEIIWTLQDTQEIKQRVVFKYSQMINISDYINRWIFVTITNNRLNNSKIYINGRLIDQKPISNLGNIHASNNIMFKLDGCRDTHRYIWIKYFNLFDKELNEKEIKDLYDNQSNSGILKDFWGDYLQYDKPYYMLNLYDPNKYVDVNNVGIRGYMYLKGPRGSVMTTNIYLNSSLYRGTKFIIKKYASGNKDNIVRNNDRVYINVVVKNKEYRLATNASQAGVEKILSALEIPDVGNLSQVVVMKSKNDQGITNKCKMNLQDNNGNDIGFIGFHQFNNIAKLVASNWYNRQIERSSRTLGCSWEFIPVDDGWGERPL

SEQ ID NO: 28 - protein, 1296 aa, Artificial Sequence
  Synthetic
MPFVNKQFNYRDPVNGVDIAYIKIPNAGQMQPVKAFKIHNKIWVIPERDTFTNPEEGDLNPPPEAKQVPVSYYDSTYLSTDNEKDNYLKGVTKLFERIYSTDLGRMLLTSIVRGIPFWGGSTIDTELKVIDTNCINVIQPDGSYRSEELNLVIIGPSADIIQFECKSFGHEVLNLTRNGYGSTQYIRFSPDFTFGFEESLEVDTNPLLGAGKFATDPAVTLAHELIHAGHRLYGIAINPNRVFKVNTNAYYEMSGLEVSFEELRTFGGHDARFIDSLQENEFRLYYYNRFRDIASTLNRAKSIVGTTASLQYMKNVFKEKYLLSEDTSGKFSVDRLRFDKLYRMLTEIYTEDNFVKFFKVLNRKTYLNFDKAVFRINIVPRVNYTIYDGFNLRNTNLAANFNGQNTEINNMNFTRLKNFTGLFEFYKLLCVRGIITSKTKSLDKGYNKALNDLCIKVNNWDLFFSPSEDNFTNDLNKGEEITSDTNIEAAEENISLDLIQQYYLTFNFDNEPENISIENLSSDIIGQLELMPNIERFPNGKKYELDKYTMFHYLRAQEFEHGKSRIALTNSVNEALLNPSRVYTFFSSDYVKKVNKATEAAMFLGWVEQLVYDFTDETSEVSTTDKIADITIIIPYIGPALNIGNMLYKDDFVGALIFSGAVILLEFIPEIAIPVLGTFALVSYIANKVLTVQTIDNALSKRNEKWDEVYKYIVTNWLAKVNTQIDLIRKKMKEALENQAEATKAIINYQYNQYTEEEKNNINFNIDDLSSKLNESINKAMININKFLNQCSVSYLMNSMIPYGVKRLEDFDASLKDALLKYIYDNRGTLIGQVDRLKDKVNNTLSTDIPFQLSKYVDNQRLLSTFTEYIKNIINTSILNLRYESNHLIDLSRYASKINIGSKVNFDPIDKNQIQLFNLESSKIEVILKNAIVYNSMYENFSTSFWIRIPKYFNSISLNNEYTIINCMENNSGWKVSLNYGEIIWTLQDTQEIKQRVVFKYSQMINISDYINRWIFVTITNNRLNNSKIYINGRLIDQKPISNLGNIHASNNIMFKLDGCRDTHRYIWIKYFNLFDKELNEKEIKDLYDNQSNSGILKDFWGDYLQYDKPYYMLNLYDPNKYVDVNNVGIRGYMYLKGPRGSVMTTNIYLNSSLYRGTKFIIKKYASGNKDNIVRNNDRVYINVVVKNKEYRLATNASQAGVEKILSALEIPDVGNLSQVVVMKSKNDQGITNKCKMNLQDNNGNDIGFIGFHQFNNIAKLVASNWYNRQIERSSRTLGCSWEFIPVDDGWGERPL

SEQ ID NO: 29 - protein, 1296 aa, Artificial Sequence
  Synthetic
MPFVNKQFNYRDPVNGVDIAYIKIPNAGQMQPVKAFKIHNKIWVIPERDTFTNPEEGDLNPPPEAKQVPVSYYDSTYLSTDNEKDNYLKGVTKLFERIYSTDLGRMLLTSIVRGIPFWGGSTIDTELKVIDTNCINVIQPDGSYRSEELNLVIIGPSADIIQFECKSFGHEVLNLTRNGYGSTQYIRFSPDFTFGFEESLEVDTNPLLGAGKFATDPAVTLAHELIHAGHRLYGIAINPNRVFKVNTNAYYEMSGLEVSFEELRTFGGHDAKFIDSLQENEFRLYYYNRFRDIASTLNRAKSIVGTTASLQYMKNVFREKYLLSEDTSGKFSVDRLRFDKLYRMLTEIYTEDNFVKFFKVLNRKTYLNFDKAVFRINIVPRVNYTIYDGFNLRNTNLAANFNGQNTEINNMNFTRLKNFTGLFEFYKLLCVRGIITSKTKSLDKGYNKALNDLCIKVNNWDLFFSPSEDNFTNDLNKGEEITSDTNIEAAEENISLDLIQQYYLTFNFDNEPENISIENLSSDIIGQLELMPNIERFPNGKKYELDKYTMFHYLRAQEFEHGKSRIALTNSVNEALLNPSRVYTFFSSDYVKKVNKATEAAMFLGWVEQLVYDFTDETSEVSTTDKIADITIIIPYIGPALNIGNMLYKDDFVGALIFSGAVILLEFIPEIAIPVLGTFALVSYIANKVLTVQTIDNALSKRNEKWDEVYKYIVTNWLAKVNTQIDLIRKKMKEALENQAEATKAIINYQYNQYTEEEKNNINFNIDDLSSKLNESINKAMININKFLNQCSVSYLMNSMIPYGVKRLEDFDASLKDALLKYIYDNRGTLIGQVDRLKDKVNNTLSTDIPFQLSKYVDNQRLLSTFTEYIKNIINTSILNLRYESNHLIDLSRYASKINIGSKVNFDPIDKNQIQLFNLESSKIEVILKNAIVYNSMYENFSTSFWIRIPKYFNSISLNNEYTIINCMENNSGWKVSLNYGEIIWTLQDTQEIKQRVVFKYSQMINISDYINRWIFVTITNNRLNNSKIYINGRLIDQKPISNLGNIHASNNIMFKLDGCRDTHRYIWIKYFNLFDKELNEKEIKDLYDNQSNSGILKDFWGDYLQYDKPYYMLNLYDPNKYVDVNNVGIRGYMYLKGPRGSVMTTNIYLNSSLYRGTKFIIKKYASGNKDNIVRNNDRVYINVVVKNKEYRLATNASQAGVEKILSALEIPDVGNLSQVVVMKSKNDQGITNKCKMNLQDNNGNDIGFIGFHQFNNIAKLVASNWYNRQIERSSRTLGCSWEFIPVDDGWGERPL

SEQ ID NO: 30 - protein, 1296 aa, Artificial Sequence
  Synthetic
MPFVNKQFNYRDPVNGVDIAYIKIPNAGQMQPVKAFKIHNKIWVIPERDTFTNPEEGDLNPPPEAKQVPVSYYDSTYLSTDNEKDNYLKGVTKLFERIYSTDLGRMLLTSIVRGIPFWGGSTIDTELKVIDTNCINVIQPDGSYRSEELNLVIIGPSADIIQFECKSFGHEVLNLTRNGYGSTQYIRFSPDFTFGFEESLEVDTNPLLGAGKFATDPAVTLAHELIHAGHRLYGIAINPNRVFKVNTNAYYEMSGLEVSFEELRTFGGHDAKFIDSLQENEFRLYYYNRFRDIASTLNRAKSIVGTTASLQYMKNVFKEKYLLSEDTSGKFSVDRLRFDRLYRMLTEIYTEDNFVKFFKVLNRKTYLNFDKAVFRINIVPRVNYTIYDGFNLRNTNLAANFNGQNTEINNMNFTRLKNFTGLFEFYKLLCVRGIITSKTKSLDKGYNKALNDLCIKVNNWDLFFSPSEDNFTNDLNKGEEITSDTNIEAAEENISLDLIQQYYLTFNFDNEPENISIENLSSDIIGQLELMPNIERFPNGKKYELDKYTMFHYLRAQEFEHGKSRIALTNSVNEALLNPSRVYTFFSSDYVKKVNKATEAAMFLGWVEQLVYDFTDETSEVSTTDKIADITIIIPYIGPALNIGNMLYKDDFVGALIFSGAVILLEFIPEIAIPVLGTFALVSYIANKVLTVQTIDNALSKRNEKWDEVYKYIVTNWLAKVNTQIDLIRKKMKEALENQAEATKAIINYQYNQYTEEEKNNINFNIDDLSSKLNESINKAMININKFLNQCSVSYLMNSMIPYGVKRLEDFDASLKDALLKYIYDNRGTLIGQVDRLKDKVNNTLSTDIPFQLSKYVDNQRLLSTFTEYIKNIINTSILNLRYESNHLIDLSRYASKINIGSKVNFDPIDKNQIQLFNLESSKIEVILKNAIVYNSMYENFSTSFWIRIPKYFNSISLNNEYTIINCMENNSGWKVSLNYGEIIWTLQDTQEIKQRVVFKYSQMINISDYINRWIFVTITNNRLNNSKIYINGRLIDQKPISNLGNIHASNNIMFKLDGCRDTHRYIWIKYFNLFDKELNEKEIKDLYDNQSNSGILKDFWGDYLQYDKPYYMLNLYDPNKYVDVNNVGIRGYMYLKGPRGSVMTTNIYLNSSLYRGTKFIIKKYASGNKDNIVRNNDRVYINVVVKNKEYRLATNASQAGVEKILSALEIPDVGNLSQVVVMKSKNDQGITNKCKMNLQDNNGNDIGFIGFHQFNNIAKLVASNWYNRQIERSSRTLGCSWEFIPVDDGWGERPL

SEQ ID NO: 31 - protein, 1296 aa, Artificial Sequence
  Synthetic
MPFVNKQFNYRDPVNGVDIAYIKIPNAGQMQPVKAFKIHNKIWVIPERDTFTNPEEGDLNPPPEAKQVPVSYYDSTYLSTDNEKDNYLKGVTKLFERIYSTDLGRMLLTSIVRGIPFWGGSTIDTELKVIDTNCINVIQPDGSYRSEELNLVIIGPSADIIQFECKSFGHEVLNLTRNGYGSTQYIRFSPDFTFGFEESLEVDTNPLLGAGKFATDPAVTLAHELIHAGHRLYGIAINPNRVFKVNTNAYYEMSGLEVSFEELRTFGGHDAKFIDSLQENEFRLYYYNRFRDIASTLNRAKSIVGTTASLQYMKNVFKEKYLLSEDTSGKFSVDRLRFDKLYRMLTEIYTEDNFVRFFKVLNRKTYLNFDKAVFRINIVPRVNYTIYDGFNLRNTNLAANFNGQNTEINNMNFTRLKNFTGLFEFYKLLCVRGIITSKTKSLDKGYNKALNDLCIKVNNWDLFFSPSEDNFTNDLNKGEEITSDTNIEAAEENISLDLIQQYYLTFNFDNEPENISIENLSSDIIGQLELMPNIERFPNGKKYELDKYTMFHYLRAQEFEHGKSRIALTNSVNEALLNPSRVYTFFSSDYVKKVNKATEAAMFLGWVEQLVYDFTDETSEVSTTDKIADITIIIPYIGPALNIGNMLYKDDFVGALIFSGAVILLEFIPEIAIPVLGTFALVSYIANKVLTVQTIDNALSKRNEKWDEVYKYIVTNWLAKVNTQIDLIRKKMKEALENQAEATKAIINYQYNQYTEEEKNNINFNIDDLSSKLNESINKAMININKFLNQCSVSYLMNSMIPYGVKRLEDFDASLKDALLKYIYDNRGTLIGQVDRLKDKVNNTLSTDIPFQLSKYVDNQRLLSTFTEYIKNIINTSILNLRYESNHLIDLSRYASKINIGSKVNFDPIDKNQIQLFNLESSKIEVILKNAIVYNSMYENFSTSFWIRIPKYFNSISLNNEYTIINCMENNSGWKVSLNYGEIIWTLQDTQEIKQRVVFKYSQMINISDYINRWIFVTITNNRLNNSKIYINGRLIDQKPISNLGNIHASNNIMFKLDGCRDTHRYIWIKYFNLFDKELNEKEIKDLYDNQSNSGILKDFWGDYLQYDKPYYMLNLYDPNKYVDVNNVGIRGYMYLKGPRGSVMTTNIYLNSSLYRGTKFIIKKYASGNKDNIVRNNDRVYINVVVKNKEYRLATNASQAGVEKILSALEIPDVGNLSQVVVMKSKNDQGITNKCKMNLQDNNGNDIGFIGFHQFNNIAKLVASNWYNRQIERSSRTLGCSWEFIPVDDGWGERPL

SEQ ID NO: 32 - protein, 1296 aa, Artificial Sequence
  Synthetic
MPFVNKQFNYRDPVNGVDIAYIKIPNAGQMQPVKAFKIHNRIWVIPERDTFTNPEEGDLNPPPEAKQVPVSYYDSTYLSTDNEKDNYLKGVTKLFERIYSTDLGRMLLTSIVRGIPFWGGSTIDTELKVIDTNCINVIQPDGSYRSEELNLVIIGPSADIIQFECKSFGHEVLNLTRNGYGSTQYIRFSPDFTFGFEESLEVDTNPLLGAGKFATDPAVTLAHELIHAGHRLYGIAINPNRVFKVNTNAYYEMSGLEVSFEELRTFGGHDAKFIDSLQENEFRLYYYNRFRDIASTLNRAKSIVGTTASLQYMKNVFREKYLLSEDTSGKFSVDRLRFDRLYRMLTEIYTEDNFVKFFKVLNRKTYLNFDKAVFRINIVPRVNYTIYDGFNLRNTNLAANFNGQNTEINNMNFTRLKNFTGLFEFYKLLCVRGIITSKTKSLDKGYNKALNDLCIKVNNWDLFFSPSEDNFTNDLNKGEEITSDTNIEAAEENISLDLIQQYYLTFNFDNEPENISIENLSSDIIGQLELMPNIERFPNGKKYELDKYTMFHYLRAQEFEHGKSRIALTNSVNEALLNPSRVYTFFSSDYVKKVNKATEAAMFLGWVEQLVYDFTDETSEVSTTDKIADITIIIPYIGPALNIGNMLYKDDFVGALIFSGAVILLEFIPEIAIPVLGTFALVSYIANKVLTVQTIDNALSKRNEKWDEVYKYIVTNWLAKVNTQIDLIRKKMKEALENQAEATKAIINYQYNQYTEEEKNNINFNIDDLSSKLNESINKAMININKFLNQCSVSYLMNSMIPYGVKRLEDFDASLKDALLKYIYDNRGTLIGQVDRLKDKVNNTLSTDIPFQLSKYVDNQRLLSTFTEYIKNIINTSILNLRYESNHLIDLSRYASKINIGSKVNFDPIDKNQIQLFNLESSKIEVILKNAIVYNSMYENFSTSFWIRIPKYFNSISLNNEYTIINCMENNSGWKVSLNYGEIIWTLQDTQEIKQRVVFKYSQMINISDYINRWIFVTITNNRLNNSKIYINGRLIDQKPISNLGNIHASNNIMFKLDGCRDTHRYIWIKYFNLFDKELNEKEIKDLYDNQSNSGILKDFWGDYLQYDKPYYMLNLYDPNKYVDVNNVGIRGYMYLKGPRGSVMTTNIYLNSSLYRGTKFIIKKYASGNKDNIVRNNDRVYINVVVKNKEYRLATNASQAGVEKILSALEIPDVGNLSQVVVMKSKNDQGITNKCKMNLQDNNGNDIGFIGFHQFNNIAKLVASNWYNRQIERSSRTLGCSWEFIPVDDGWGERPL

SEQ ID NO: 33 - protein, 1296 aa, Artificial Sequence
  Synthetic
MPFVNKQFNYRDPVNGVDIAYIKIPNAGQMQPVKAFKIHNRIWVIPERDTFTNPEEGDLNPPPEAKQVPVSYYDSTYLSTDNEKDNYLKGVTKLFERIYSTDLGRMLLTSIVRGIPFWGGSTIDTELKVIDTNCINVIQPDGSYRSEELNLVIIGPSADIIQFECKSFGHEVLNLTRNGYGSTQYIRFSPDFTFGFEESLEVDTNPLLGAGRFATDPAVTLAHELIHAGHRLYGIAINPNRVFKVNTNAYYEMSGLEVSFEELRTFGGHDAKFIDSLQENEFRLYYYNRFRDIASTLNRAKSIVGTTASLQYMKNVFREKYLLSEDTSGKFSVDRLRFDRLYRMLTEIYTEDNFVRFFKVLNRKTYLNFDKAVFRINIVPRVNYTIYDGFNLRNTNLAANFNGQNTEINNMNFTRLKNFTGLFEFYKLLCVRGIITSKTKSLDKGYNKALNDLCIKVNNWDLFFSPSEDNFTNDLNKGEEITSDTNIEAAEENISLDLIQQYYLTFNFDNEPENISIENLSSDIIGQLELMPNIERFPNGKKYELDKYTMFHYLRAQEFEHGKSRIALTNSVNEALLNPSRVYTFFSSDYVKKVNKATEAAMFLGWVEQLVYDFTDETSEVSTTDKIADITIIIPYIGPALNIGNMLYKDDFVGALIFSGAVILLEFIPEIAIPVLGTFALVSYIANKVLTVQTIDNALSKRNEKWDEVYKYIVTNWLAKVNTQIDLIRKKMKEALENQAEATKAIINYQYNQYTEEEKNNINFNIDDLSSKLNESINKAMININKFLNQCSVSYLMNSMIPYGVKRLEDFDASLKDALLKYIYDNRGTLIGQVDRLKDKVNNTLSTDIPFQLSKYVDNQRLLSTFTEYIKNIINTSILNLRYESNHLIDLSRYASKINIGSKVNFDPIDKNQIQLFNLESSKIEVILKNAIVYNSMYENFSTSFWIRIPKYFNSISLNNEYTIINCMENNSGWKVSLNYGEIIWTLQDTQEIKQRVVFKYSQMINISDYINRWIFVTITNNRLNNSKIYINGRLIDQKPISNLGNIHASNNIMFKLDGCRDTHRYIWIKYFNLFDKELNEKEIKDLYDNQSNSGILKDFWGDYLQYDKPYYMLNLYDPNKYVDVNNVGIRGYMYLKGPRGSVMTTNIYLNSSLYRGTKFIIKKYASGNKDNIVRNNDRVYINVVVKNKEYRLATNASQAGVEKILSALEIPDVGNLSQVVVMKSKNDQGITNKCKMNLQDNNGNDIGFIGFHQFNNIAKLVASNWYNRQIERSSRTLGCSWEFIPVDDGWGERPL

SEQ ID NO: 34 - protein, 1296 aa, Artificial Sequence
  Synthetic
MPFVNKQFNYRDPVNGVDIAYIKIPNAGQMQPVKAFKIHNRIWVIPERDTFTNPEEGDLNPPPEAKQVPVSYYDSTYLSTDNEKDNYLKGVTKLFERIYSTDLGRMLLTSIVRGIPFWGGSTIDTELKVIDTNCINVIQPDGSYRSEELNLVIIGPSADIIQFECKSFGHEVLNLTRNGYGSTQYIRFSPDFTFGFEESLEVDTNPLLGAGRFATDPAVTLAHELIHAGHRLYGIAINPNRVFKVNTNAYYEMSGLEVSFEELRTFGGHDARFIDSLQENEFRLYYYNRFRDIASTLNRAKSIVGTTASLQYMKNVFREKYLLSEDTSGKFSVDRLRFDRLYRMLTEIYTEDNFVRFFKVLNRKTYLNFDKAVFRINIVPRVNYTIYDGFNLRNTNLAANFNGQNTEINNMNFTRLKNFTGLFEFYKLLCVRGIITSKTKSLDKGYNKALNDLCIKVNNWDLFFSPSEDNFTNDLNKGEEITSDTNIEAAEENISLDLIQQYYLTFNFDNEPENISIENLSSDIIGQLELMPNIERFPNGKKYELDKYTMFHYLRAQEFEHGKSRIALTNSVNEALLNPSRVYTFFSSDYVKKVNKATEAAMFLGWVEQLVYDFTDETSEVSTTDKIADITIIIPYIGPALNIGNMLYKDDFVGALIFSGAVILLEFIPEIAIPVLGTFALVSYIANKVLTVQTIDNALSKRNEKWDEVYKYIVTNWLAKVNTQIDLIRKKMKEALENQAEATKAIINYQYNQYTEEEKNNINFNIDDLSSKLNESINKAMININKFLNQCSVSYLMNSMIPYGVKRLEDFDASLKDALLKYIYDNRGTLIGQVDRLKDKVNNTLSTDIPFQLSKYVDNQRLLSTFTEYIKNIINTSILNLRYESNHLIDLSRYASKINIGSKVNFDPIDKNQIQLFNLESSKIEVILKNAIVYNSMYENFSTSFWIRIPKYFNSISLNNEYTIINCMENNSGWKVSLNYGEIIWTLQDTQEIKQRVVFKYSQMINISDYINRWIFVTITNNRLNNSKIYINGRLIDQKPISNLGNIHASNNIMFKLDGCRDTHRYIWIKYFNLFDKELNEKEIKDLYDNQSNSGILKDFWGDYLQYDKPYYMLNLYDPNKYVDVNNVGIRGYMYLKGPRGSVMTTNIYLNSSLYRGTKFIIKKYASGNKDNIVRNNDRVYINVVVKNKEYRLATNASQAGVEKILSALEIPDVGNLSQVVVMKSKNDQGITNKCKMNLQDNNGNDIGFIGFHQFNNIAKLVASNWYNRQIERSSRTLGCSWEFIPVDDGWGERPL

SEQ ID NO: 35 - protein, 1296 aa, Clostridium botulinum
MPFVNKQFNYKDPVNGVDIAYIKIPNAGQMQPVKAFKIHNKIWVIPERDTFTNPEEGDLNPPPEAKQVPVSYYDSTYLSTDNEKDNYLKGVTKLFERIYSTDLGRMLLTSIVRGIPFWGGSTIDTELKVIDTNCINVIQPDGSYRSEELNLVIIGPSADIIQFECKSFGHDVLNLTRNGYGSTQYIRFSPDFTFGFEESLEVDTNPLLGAGKFATDPAVTLAHELIHAEHRLYGIAINPNRVFKVNTNAYYEMSGLEVSFEELRTFGGHDAKFIDSLQENEFRLYYYNKFKDVASTLNKAKSIIGTTASLQYMKNVFKEKYLLSEDTSGKFSVDKLKFDKLYKMLTEIYTEDNFVNFFKVINRKTYLNFDKAVFRINIVPDENYTIKDGFNLKGANLSTNFNGQNTEINSRNFTRLKNFTGLFEFYKLLCVRGIIPFKTKSLDEGYNKALNDLCIKVNNWDLFFSPSEDNFTNDLDKVEEITADTNIEAAEENISLDLIQQYYLTFDFDNEPENISIENLSSDIIGQLEPMPNIERFPNGKKYELDKYTMFHYLRAQEFEHGDSRIILTNSAEEALLKPNVAYTFFSSKYVKKINKAVEAFMFLNWAEELVYDFTDETNEVTTMDKIADITIIVPYIGPALNIGNMLSKGEFVEAIIFTGVVAMLEFIPEYALPVFGTFAIVSYIANKVLTVQTINNALSKRNEKWDEVYKYTVTNWLAKVNTQIDLIREKMKKALENQAEATKAIINYQYNQYTEEEKNNINFNIDDLSSKLNESINSAMININKFLDQCSVSYLMNSMIPYAVKRLKDFDASVRDVLLKYIYDNRGTLVLQVDRLKDEVNNTLSADIPFQLSKYVDNKKLLSTFTEYIKNIVNTSILSIVYKKDDLIDLSRYGAKINIGDRVYYDSIDKNQIKLINLESSTIEVILKNAIVYNSMYENFSTSFWIKIPKYFSKINLNNEYTIINCIENNSGWKVSLNYGEIIWTLQDNKQNIQRVVFKYSQMVNISDYINRWIFVTITNNRLTKSKIYINGRLIDQKPISNLGNIHASNKIMFKLDGCRDPRRYIMIKYFNLFDKELNEKEIKDLYDSQSNSGILKDFWGNYLQYDKPYYMLNLFDPNKYVDVNNIGIRGYMYLKGPRGSVVTTNIYLNSTLYEGTKFIIKKYASGNEDNIVRNNDRVYINVVVKNKEYRLATNASQAGVEKILSALEIPDVGNLSQVVVMKSKDDQGIRNKCKMNLQDNNGNDIGFIGFHLYDNIAKLVASNWYNRQVGKASRTFGCSWEFIPVDDGWGESSL

SEQ ID NO: 36 - protein, 1296 aa, Artificial Sequence
  Synthetic
MPFVNKQFNYRDPVNGVDIAYIKIPNAGQMQPVKAFKIHNKIWVIPERDTFTNPEEGDLNPPPEAKQVPVSYYDSTYLSTDNEKDNYLKGVTKLFERIYSTDLGRMLLTSIVRGIPFWGGSTIDTELKVIDTNCINVIQPDGSYRSEELNLVIIGPSADIIQFECKSFGHDVLNLTRNGYGSTQYIRFSPDFTFGFEESLEVDTNPLLGAGKFATDPAVTLAHELIHAEHRLYGIAINPNRVFKVNTNAYYEMSGLEVSFEELRTFGGHDAKFIDSLQENEFRLYYYNKFKDVASTLNKAKSIIGTTASLQYMKNVFKEKYLLSEDTSGKFSVDKLKFDKLYKMLTEIYTEDNFVNFFKVINRKTYLNFDKAVFRINIVPDENYTIKDGFNLKGANLSTNFNGQNTEINSRNFTRLKNFTGLFEFYKLLCVRGIIPFKTKSLDEGYNKALNDLCIKVNNWDLFFSPSEDNFTNDLDKVEEITADTNIEAAEENISLDLIQQYYLTFDFDNEPENISIENLSSDIIGQLEPMPNIERFPNGKKYELDKYTMFHYLRAQEFEHGDSRIILTNSAEEALLKPNVAYTFFSSKYVKKINKAVEAFMFLNWAEELVYDFTDETNEVTTMDKIADITIIVPYIGPALNIGNMLSKGEFVEAIIFTGVVAMLEFIPEYALPVFGTFAIVSYIANKVLTVQTINNALSKRNEKWDEVYKYTVTNWLAKVNTQIDLIREKMKKALENQAEATKAIINYQYNQYTEEEKNNINFNIDDLSSKLNESINSAMININKFLDQCSVSYLMNSMIPYAVKRLKDFDASVRDVLLKYIYDNRGTLVLQVDRLKDEVNNTLSADIPFQLSKYVDNKKLLSTFTEYIKNIVNTSILSIVYKKDDLIDLSRYGAKINIGDRVYYDSIDKNQIKLINLESSTIEVILKNAIVYNSMYENFSTSFWIKIPKYFSKINLNNEYTIINCIENNSGWKVSLNYGEIIWTLQDNKQNIQRVVFKYSQMVNISDYINRWIFVTITNNRLTKSKIYINGRLIDQKPISNLGNIHASNKIMFKLDGCRDPRRYIMIKYFNLFDKELNEKEIKDLYDSQSNSGILKDFWGNYLQYDKPYYMLNLFDPNKYVDVNNIGIRGYMYLKGPRGSVVTTNIYLNSTLYEGTKFIIKKYASGNEDNIVRNNDRVYINVVVKNKEYRLATNASQAGVEKILSALEIPDVGNLSQVVVMKSKDDQGIRNKCKMNLQDNNGNDIGFIGFHLYDNIAKLVASNWYNRQVGKASRTFGCSWEFIPVDDGWGESSL

SEQ ID NO: 37 - protein, 1296 aa, Artificial Sequence
  Synthetic
MPFVNKQFNYKDPVNGVDIAYIKIPNAGQMQPVKAFKIHNKIWVIPERDTFTNPEEGDLNPPPEAKQVPVSYYDSTYLSTDNEKDNYLKGVTKLFERIYSTDLGRMLLTSIVRGIPFWGGSTIDTELKVIDTNCINVIQPDGSYRSEELNLVIIGPSADIIQFECKSFGHDVLNLTRNGYGSTQYIRFSPDFTFGFEESLEVDTNPLLGAGKFATDPAVTLAHELIHAEHRLYGIAINPNRVFKVNTNAYYEMSGLEVSFEELRTFGGHDAKFIDSLQENEFRLYYYNRFKDVASTLNKAKSIIGTTASLQYMKNVFKEKYLLSEDTSGKFSVDKLKFDKLYKMLTEIYTEDNFVNFFKVINRKTYLNFDKAVFRINIVPDENYTIKDGFNLKGANLSTNFNGQNTEINSRNFTRLKNFTGLFEFYKLLCVRGIIPFKTKSLDEGYNKALNDLCIKVNNWDLFFSPSEDNFTNDLDKVEEITADTNIEAAEENISLDLIQQYYLTFDFDNEPENISIENLSSDIIGQLEPMPNIERFPNGKKYELDKYTMFHYLRAQEFEHGDSRIILTNSAEEALLKPNVAYTFFSSKYVKKINKAVEAFMFLNWAEELVYDFTDETNEVTTMDKIADITIIVPYIGPALNIGNMLSKGEFVEAIIFTGVVAMLEFIPEYALPVFGTFAIVSYIANKVLTVQTINNALSKRNEKWDEVYKYTVTNWLAKVNTQIDLIREKMKKALENQAEATKAIINYQYNQYTEEEKNNINFNIDDLSSKLNESINSAMININKFLDQCSVSYLMNSMIPYAVKRLKDFDASVRDVLLKYIYDNRGTLVLQVDRLKDEVNNTLSADIPFQLSKYVDNKKLLSTFTEYIKNIVNTSILSIVYKKDDLIDLSRYGAKINIGDRVYYDSIDKNQIKLINLESSTIEVILKNAIVYNSMYENFSTSFWIKIPKYFSKINLNNEYTIINCIENNSGWKVSLNYGEIIWTLQDNKQNIQRVVFKYSQMVNISDYINRWIFVTITNNRLTKSKIYINGRLIDQKPISNLGNIHASNKIMFKLDGCRDPRRYIMIKYFNLFDKELNEKEIKDLYDSQSNSGILKDFWGNYLQYDKPYYMLNLFDPNKYVDVNNIGIRGYMYLKGPRGSVVTTNIYLNSTLYEGTKFIIKKYASGNEDNIVRNNDRVYINVVVKNKEYRLATNASQAGVEKILSALEIPDVGNLSQVVVMKSKDDQGIRNKCKMNLQDNNGNDIGFIGFHLYDNIAKLVASNWYNRQVGKASRTFGCSWEFIPVDDGWGESSL

SEQ ID NO: 38 - protein, 1296 aa, Artificial Sequence
  Synthetic
MPFVNKQFNYKDPVNGVDIAYIKIPNAGQMQPVKAFKIHNKIWVIPERDTFTNPEEGDLNPPPEAKQVPVSYYDSTYLSTDNEKDNYLKGVTKLFERIYSTDLGRMLLTSIVRGIPFWGGSTIDTELKVIDTNCINVIQPDGSYRSEELNLVIIGPSADIIQFECKSFGHDVLNLTRNGYGSTQYIRFSPDFTFGFEESLEVDTNPLLGAGKFATDPAVTLAHELIHAEHRLYGIAINPNRVFKVNTNAYYEMSGLEVSFEELRTFGGHDAKFIDSLQENEFRLYYYNKFRDVASTLNKAKSIIGTTASLQYMKNVFKEKYLLSEDTSGKFSVDKLKFDKLYKMLTEIYTEDNFVNFFKVINRKTYLNFDKAVFRINIVPDENYTIKDGFNLKGANLSTNFNGQNTEINSRNFTRLKNFTGLFEFYKLLCVRGIIPFKTKSLDEGYNKALNDLCIKVNNWDLFFSPSEDNFTNDLDKVEEITADTNIEAAEENISLDLIQQYYLTFDFDNEPENISIENLSSDIIGQLEPMPNIERFPNGKKYELDKYTMFHYLRAQEFEHGDSRIILTNSAEEALLKPNVAYTFFSSKYVKKINKAVEAFMFLNWAEELVYDFTDETNEVTTMDKIADITIIVPYIGPALNIGNMLSKGEFVEAIIFTGVVAMLEFIPEYALPVFGTFAIVSYIANKVLTVQTINNALSKRNEKWDEVYKYTVTNWLAKVNTQIDLIREKMKKALENQAEATKAIINYQYNQYTEEEKNNINFNIDDLSSKLNESINSAMININKFLDQCSVSYLMNSMIPYAVKRLKDFDASVRDVLLKYIYDNRGTLVLQVDRLKDEVNNTLSADIPFQLSKYVDNKKLLSTFTEYIKNIVNTSILSIVYKKDDLIDLSRYGAKINIGDRVYYDSIDKNQIKLINLESSTIEVILKNAIVYNSMYENFSTSFWIKIPKYFSKINLNNEYTIINCIENNSGWKVSLNYGEIIWTLQDNKQNIQRVVFKYSQMVNISDYINRWIFVTITNNRLTKSKIYINGRLIDQKPISNLGNIHASNKIMFKLDGCRDPRRYIMIKYFNLFDKELNEKEIKDLYDSQSNSGILKDFWGNYLQYDKPYYMLNLFDPNKYVDVNNIGIRGYMYLKGPRGSVVTTNIYLNSTLYEGTKFIIKKYASGNEDNIVRNNDRVYINVVVKNKEYRLATNASQAGVEKILSALEIPDVGNLSQVVVMKSKDDQGIRNKCKMNLQDNNGNDIGFIGFHLYDNIAKLVASNWYNRQVGKASRTFGCSWEFIPVDDGWGESSL

SEQ ID NO: 39 - protein, 1296 aa, Artificial Sequence
  Synthetic
MPFVNKQFNYKDPVNGVDIAYIKIPNAGQMQPVKAFKIHNKIWVIPERDTFTNPEEGDLNPPPEAKQVPVSYYDSTYLSTDNEKDNYLKGVTKLFERIYSTDLGRMLLTSIVRGIPFWGGSTIDTELKVIDTNCINVIQPDGSYRSEELNLVIIGPSADIIQFECKSFGHDVLNLTRNGYGSTQYIRFSPDFTFGFEESLEVDTNPLLGAGKFATDPAVTLAHELIHAEHRLYGIAINPNRVFKVNTNAYYEMSGLEVSFEELRTFGGHDAKFIDSLQENEFRLYYYNKFKDVASTLNRAKSIIGTTASLQYMKNVFKEKYLLSEDTSGKFSVDKLKFDKLYKMLTEIYTEDNFVNFFKVINRKTYLNFDKAVFRINIVPDENYTIKDGFNLKGANLSTNFNGQNTEINSRNFTRLKNFTGLFEFYKLLCVRGIIPFKTKSLDEGYNKALNDLCIKVNNWDLFFSPSEDNFTNDLDKVEEITADTNIEAAEENISLDLIQQYYLTFDFDNEPENISIENLSSDIIGQLEPMPNIERFPNGKKYELDKYTMFHYLRAQEFEHGDSRIILTNSAEEALLKPNVAYTFFSSKYVKKINKAVEAFMFLNWAEELVYDFTDETNEVTTMDKIADITIIVPYIGPALNIGNMLSKGEFVEAIIFTGVVAMLEFIPEYALPVFGTFAIVSYIANKVLTVQTINNALSKRNEKWDEVYKYTVTNWLAKVNTQIDLIREKMKKALENQAEATKAIINYQYNQYTEEEKNNINFNIDDLSSKLNESINSAMININKFLDQCSVSYLMNSMIPYAVKRLKDFDASVRDVLLKYIYDNRGTLVLQVDRLKDEVNNTLSADIPFQLSKYVDNKKLLSTFTEYIKNIVNTSILSIVYKKDDLIDLSRYGAKINIGDRVYYDSIDKNQIKLINLESSTIEVILKNAIVYNSMYENFSTSFWIKIPKYFSKINLNNEYTIINCIENNSGWKVSLNYGEIIWTLQDNKQNIQRVVFKYSQMVNISDYINRWIFVTITNNRLTKSKIYINGRLIDQKPISNLGNIHASNKIMFKLDGCRDPRRYIMIKYFNLFDKELNEKEIKDLYDSQSNSGILKDFWGNYLQYDKPYYMLNLFDPNKYVDVNNIGIRGYMYLKGPRGSVVTTNIYLNSTLYEGTKFIIKKYASGNEDNIVRNNDRVYINVVVKNKEYRLATNASQAGVEKILSALEIPDVGNLSQVVVMKSKDDQGIRNKCKMNLQDNNGNDIGFIGFHLYDNIAKLVASNWYNRQVGKASRTFGCSWEFIPVDDGWGESSL

SEQ ID NO: 40 - protein, 1296 aa, Artificial Sequence
  Synthetic
MPFVNKQFNYKDPVNGVDIAYIKIPNAGQMQPVKAFKIHNKIWVIPERDTFTNPEEGDLNPPPEAKQVPVSYYDSTYLSTDNEKDNYLKGVTKLFERIYSTDLGRMLLTSIVRGIPFWGGSTIDTELKVIDTNCINVIQPDGSYRSEELNLVIIGPSADIIQFECKSFGHDVLNLTRNGYGSTQYIRFSPDFTFGFEESLEVDTNPLLGAGKFATDPAVTLAHELIHAEHRLYGIAINPNRVFKVNTNAYYEMSGLEVSFEELRTFGGHDAKFIDSLQENEFRLYYYNKFKDVASTLNKAKSIIGTTASLQYMKNVFKEKYLLSEDTSGKFSVDRLKFDKLYKMLTEIYTEDNFVNFFKVINRKTYLNFDKAVFRINIVPDENYTIKDGFNLKGANLSTNFNGQNTEINSRNFTRLKNFTGLFEFYKLLCVRGIIPFKTKSLDEGYNKALNDLCIKVNNWDLFFSPSEDNFTNDLDKVEEITADTNIEAAEENISLDLIQQYYLTFDFDNEPENISIENLSSDIIGQLEPMPNIERFPNGKKYELDKYTMFHYLRAQEFEHGDSRIILTNSAEEALLKPNVAYTFFSSKYVKKINKAVEAFMFLNWAEELVYDFTDETNEVTTMDKIADITIIVPYIGPALNIGNMLSKGEFVEAIIFTGVVAMLEFIPEYALPVFGTFAIVSYIANKVLTVQTINNALSKRNEKWDEVYKYTVTNWLAKVNTQIDLIREKMKKALENQAEATKAIINYQYNQYTEEEKNNINFNIDDLSSKLNESINSAMININKFLDQCSVSYLMNSMIPYAVKRLKDFDASVRDVLLKYIYDNRGTLVLQVDRLKDEVNNTLSADIPFQLSKYVDNKKLLSTFTEYIKNIVNTSILSIVYKKDDLIDLSRYGAKINIGDRVYYDSIDKNQIKLINLESSTIEVILKNAIVYNSMYENFSTSFWIKIPKYFSKINLNNEYTIINCIENNSGWKVSLNYGEIIWTLQDNKQNIQRVVFKYSQMVNISDYINRWIFVTITNNRLTKSKIYINGRLIDQKPISNLGNIHASNKIMFKLDGCRDPRRYIMIKYFNLFDKELNEKEIKDLYDSQSNSGILKDFWGNYLQYDKPYYMLNLFDPNKYVDVNNIGIRGYMYLKGPRGSVVTTNIYLNSTLYEGTKFIIKKYASGNEDNIVRNNDRVYINVVVKNKEYRLATNASQAGVEKILSALEIPDVGNLSQVVVMKSKDDQGIRNKCKMNLQDNNGNDIGFIGFHLYDNIAKLVASNWYNRQVGKASRTFGCSWEFIPVDDGWGESSL

SEQ ID NO: 41 - protein, 1296 aa, Artificial Sequence
  Synthetic
MPFVNKQFNYKDPVNGVDIAYIKIPNAGQMQPVKAFKIHNKIWVIPERDTFTNPEEGDLNPPPEAKQVPVSYYDSTYLSTDNEKDNYLKGVTKLFERIYSTDLGRMLLTSIVRGIPFWGGSTIDTELKVIDTNCINVIQPDGSYRSEELNLVIIGPSADIIQFECKSFGHDVLNLTRNGYGSTQYIRFSPDFTFGFEESLEVDTNPLLGAGKFATDPAVTLAHELIHAEHRLYGIAINPNRVFKVNTNAYYEMSGLEVSFEELRTFGGHDAKFIDSLQENEFRLYYYNKFKDVASTLNKAKSIIGTTASLQYMKNVFKEKYLLSEDTSGKFSVDKLRFDKLYKMLTEIYTEDNFVNFFKVINRKTYLNFDKAVFRINIVPDENYTIKDGFNLKGANLSTNFNGQNTEINSRNFTRLKNFTGLFEFYKLLCVRGIIPFKTKSLDEGYNKALNDLCIKVNNWDLFFSPSEDNFTNDLDKVEEITADTNIEAAEENISLDLIQQYYLTFDFDNEPENISIENLSSDIIGQLEPMPNIERFPNGKKYELDKYTMFHYLRAQEFEHGDSRIILTNSAEEALLKPNVAYTFFSSKYVKKINKAVEAFMFLNWAEELVYDFTDETNEVTTMDKIADITIIVPYIGPALNIGNMLSKGEFVEAIIFTGVVAMLEFIPEYALPVFGTFAIVSYIANKVLTVQTINNALSKRNEKWDEVYKYTVTNWLAKVNTQIDLIREKMKKALENQAEATKAIINYQYNQYTEEEKNNINFNIDDLSSKLNESINSAMININKFLDQCSVSYLMNSMIPYAVKRLKDFDASVRDVLLKYIYDNRGTLVLQVDRLKDEVNNTLSADIPFQLSKYVDNKKLLSTFTEYIKNIVNTSILSIVYKKDDLIDLSRYGAKINIGDRVYYDSIDKNQIKLINLESSTIEVILKNAIVYNSMYENFSTSFWIKIPKYFSKINLNNEYTIINCIENNSGWKVSLNYGEIIWTLQDNKQNIQRVVFKYSQMVNISDYINRWIFVTITNNRLTKSKIYINGRLIDQKPISNLGNIHASNKIMFKLDGCRDPRRYIMIKYFNLFDKELNEKEIKDLYDSQSNSGILKDFWGNYLQYDKPYYMLNLFDPNKYVDVNNIGIRGYMYLKGPRGSVVTTNIYLNSTLYEGTKFIIKKYASGNEDNIVRNNDRVYINVVVKNKEYRLATNASQAGVEKILSALEIPDVGNLSQVVVMKSKDDQGIRNKCKMNLQDNNGNDIGFIGFHLYDNIAKLVASNWYNRQVGKASRTFGCSWEFIPVDDGWGESSL

SEQ ID NO: 42 - protein, 1296 aa, Artificial Sequence
  Synthetic
MPFVNKQFNYKDPVNGVDIAYIKIPNAGQMQPVKAFKIHNKIWVIPERDTFTNPEEGDLNPPPEAKQVPVSYYDSTYLSTDNEKDNYLKGVTKLFERIYSTDLGRMLLTSIVRGIPFWGGSTIDTELKVIDTNCINVIQPDGSYRSEELNLVIIGPSADIIQFECKSFGHDVLNLTRNGYGSTQYIRFSPDFTFGFEESLEVDTNPLLGAGKFATDPAVTLAHELIHAEHRLYGIAINPNRVFKVNTNAYYEMSGLEVSFEELRTFGGHDAKFIDSLQENEFRLYYYNKFKDVASTLNKAKSIIGTTASLQYMKNVFKEKYLLSEDTSGKFSVDKLKFDKLYRMLTEIYTEDNFVNFFKVINRKTYLNFDKAVFRINIVPDENYTIKDGFNLKGANLSTNFNGQNTEINSRNFTRLKNFTGLFEFYKLLCVRGIIPFKTKSLDEGYNKALNDLCIKVNNWDLFFSPSEDNFTNDLDKVEEITADTNIEAAEENISLDLIQQYYLTFDFDNEPENISIENLSSDIIGQLEPMPNIERFPNGKKYELDKYTMFHYLRAQEFEHGDSRIILTNSAEEALLKPNVAYTFFSSKYVKKINKAVEAFMFLNWAEELVYDFTDETNEVTTMDKIADITIIVPYIGPALNIGNMLSKGEFVEAIIFTGVVAMLEFIPEYALPVFGTFAIVSYIANKVLTVQTINNALSKRNEKWDEVYKYTVTNWLAKVNTQIDLIREKMKKALENQAEATKAIINYQYNQYTEEEKNNINFNIDDLSSKLNESINSAMININKFLDQCSVSYLMNSMIPYAVKRLKDFDASVRDVLLKYIYDNRGTLVLQVDRLKDEVNNTLSADIPFQLSKYVDNKKLLSTFTEYIKNIVNTSILSIVYKKDDLIDLSRYGAKINIGDRVYYDSIDKNQIKLINLESSTIEVILKNAIVYNSMYENFSTSFWIKIPKYFSKINLNNEYTIINCIENNSGWKVSLNYGEIIWTLQDNKQNIQRVVFKYSQMVNISDYINRWIFVTITNNRLTKSKIYINGRLIDQKPISNLGNIHASNKIMFKLDGCRDPRRYIMIKYFNLFDKELNEKEIKDLYDSQSNSGILKDFWGNYLQYDKPYYMLNLFDPNKYVDVNNIGIRGYMYLKGPRGSVVTTNIYLNSTLYEGTKFIIKKYASGNEDNIVRNNDRVYINVVVKNKEYRLATNASQAGVEKILSALEIPDVGNLSQVVVMKSKDDQGIRNKCKMNLQDNNGNDIGFIGFHLYDNIAKLVASNWYNRQVGKASRTFGCSWEFIPVDDGWGESSL

SEQ ID NO: 43 - protein, 1296 aa, Artificial Sequence
  Synthetic
MPFVNKQFNYRDPVNGVDIAYIKIPNAGQMQPVKAFKIHNKIWVIPERDTFTNPEEGDLNPPPEAKQVPVSYYDSTYLSTDNEKDNYLKGVTKLFERIYSTDLGRMLLTSIVRGIPFWGGSTIDTELKVIDTNCINVIQPDGSYRSEELNLVIIGPSADIIQFECKSFGHDVLNLTRNGYGSTQYIRFSPDFTFGFEESLEVDTNPLLGAGKFATDPAVTLAHELIHAEHRLYGIAINPNRVFKVNTNAYYEMSGLEVSFEELRTFGGHDAKFIDSLQENEFRLYYYNRFRDVASTLNRAKSIIGTTASLQYMKNVFKEKYLLSEDTSGKFSVDRLRFDKLYRMLTEIYTEDNFVNFFKVINRKTYLNFDKAVFRINIVPDENYTIKDGFNLKGANLSTNFNGQNTEINSRNFTRLKNFTGLFEFYKLLCVRGIIPFKTKSLDEGYNKALNDLCIKVNNWDLFFSPSEDNFTNDLDKVEEITADTNIEAAEENISLDLIQQYYLTFDFDNEPENISIENLSSDIIGQLEPMPNIERFPNGKKYELDKYTMFHYLRAQEFEHGDSRIILTNSAEEALLKPNVAYTFFSSKYVKKINKAVEAFMFLNWAEELVYDFTDETNEVTTMDKIADITIIVPYIGPALNIGNMLSKGEFVEAIIFTGVVAMLEFIPEYALPVFGTFAIVSYIANKVLTVQTINNALSKRNEKWDEVYKYTVTNWLAKVNTQIDLIREKMKKALENQAEATKAIINYQYNQYTEEEKNNINFNIDDLSSKLNESINSAMININKFLDQCSVSYLMNSMIPYAVKRLKDFDASVRDVLLKYIYDNRGTLVLQVDRLKDEVNNTLSADIPFQLSKYVDNKKLLSTFTEYIKNIVNTSILSIVYKKDDLIDLSRYGAKINIGDRVYYDSIDKNQIKLINLESSTIEVILKNAIVYNSMYENFSTSFWIKIPKYFSKINLNNEYTIINCIENNSGWKVSLNYGEIIWTLQDNKQNIQRVVFKYSQMVNISDYINRWIFVTITNNRLTKSKIYINGRLIDQKPISNLGNIHASNKIMFKLDGCRDPRRYIMIKYFNLFDKELNEKEIKDLYDSQSNSGILKDFWGNYLQYDKPYYMLNLFDPNKYVDVNNIGIRGYMYLKGPRGSVVTTNIYLNSTLYEGTKFIIKKYASGNEDNIVRNNDRVYINVVVKNKEYRLATNASQAGVEKILSALEIPDVGNLSQVVVMKSKDDQGIRNKCKMNLQDNNGNDIGFIGFHLYDNIAKLVASNWYNRQVGKASRTFGCSWEFIPVDDGWGESSL

SEQ ID NO: 44 - protein, 872 aa, Clostridium botulinum
MPFVNKQFNYKDPVNGVDIAYIKIPNAGQMQPVKAFKIHNKIWVIPERDTFTNPEEGDLNPPPEAKQVPVSYYDSTYLSTDNEKDNYLKGVTKLFERIYSTDLGRMLLTSIVRGIPFWGGSTIDTELKVIDTNCINVIQPDGSYRSEELNLVIIGPSADIIQFECKSFGHEVLNLTRNGYGSTQYIRFSPDFTFGFEESLEVDTNPLLGAGKFATDPAVTLAHELIHAGHRLYGIAINPNRVFKVNTNAYYEMSGLEVSFEELRTFGGHDAKFIDSLQENEFRLYYYNKFKDIASTLNKAKSIVGTTASLQYMKNVFKEKYLLSEDTSGKFSVDKLKFDKLYKMLTEIYTEDNFVKFFKVLNRKTYLNFDKAVFKINIVPKVNYTIYDGFNLRNTNLAANFNGQNTEINNMNFTKLKNFTGLFEFYKLLCVRGIITSKTKSLDKGYNKALNDLCIKVNNWDLFFSPSEDNFTNDLNKGEEITSDTNIEAAEENISLDLIQQYYLTFNFDNEPENISIENLSSDIIGQLELMPNIERFPNGKKYELDKYTMFHYLRAQEFEHGKSRIALTNSVNEALLNPSRVYTFFSSDYVKKVNKATEAAMFLGWVEQLVYDFTDETSEVSTTDKIADITIIIPYIGPALNIGNMLYKDDFVGALIFSGAVILLEFIPEIAIPVLGTFALVSYIANKVLTVQTIDNALSKRNEKWDEVYKYIVTNWLAKVNTQIDLIRKKMKEALENQAEATKAIINYQYNQYTEEEKNNINFNIDDLSSKLNESINKAMININKFLNQCSVSYLMNSMIPYGVKRLEDFDASLKDALLKYIYDNRGTLIGQVDRLKDKVNNTLSTDIPFQLSKYVDNQRLLSTFTEYIKN

SEQ ID NO: 45 - protein, 872 aa, Artificial Sequence
  Synthetic
MPFVNKQFNYRDPVNGVDIAYIKIPNAGQMQPVKAFKIHNKIWVIPERDTFTNPEEGDLNPPPEAKQVPVSYYDSTYLSTDNEKDNYLKGVTKLFERIYSTDLGRMLLTSIVRGIPFWGGSTIDTELKVIDTNCINVIQPDGSYRSEELNLVIIGPSADIIQFECKSFGHEVLNLTRNGYGSTQYIRFSPDFTFGFEESLEVDTNPLLGAGKFATDPAVTLAHELIHAGHRLYGIAINPNRVFKVNTNAYYEMSGLEVSFEELRTFGGHDAKFIDSLQENEFRLYYYNKFKDIASTLNKAKSIVGTTASLQYMKNVFKEKYLLSEDTSGKFSVDKLKFDKLYKMLTEIYTEDNFVKFFKVLNRKTYLNFDKAVFKINIVPKVNYTIYDGFNLRNTNLAANFNGQNTEINNMNFTKLKNFTGLFEFYKLLCVRGIITSKTKSLDKGYNKALNDLCIKVNNWDLFFSPSEDNFTNDLNKGEEITSDTNIEAAEENISLDLIQQYYLTFNFDNEPENISIENLSSDIIGQLELMPNIERFPNGKKYELDKYTMFHYLRAQEFEHGKSRIALTNSVNEALLNPSRVYTFFSSDYVKKVNKATEAAMFLGWVEQLVYDFTDETSEVSTTDKIADITIIIPYIGPALNIGNMLYKDDFVGALIFSGAVILLEFIPEIAIPVLGTFALVSYIANKVLTVQTIDNALSKRNEKWDEVYKYIVTNWLAKVNTQIDLIRKKMKEALENQAEATKAIINYQYNQYTEEEKNNINFNIDDLSSKLNESINKAMININKFLNQCSVSYLMNSMIPYGVKRLEDFDASLKDALLKYIYDNRGTLIGQVDRLKDKVNNTLSTDIPFQLSKYVDNQRLLSTFTEYIKN

SEQ ID NO: 46 - protein, 872 aa, Artificial Sequence
  Synthetic
MPFVNKQFNYKDPVNGVDIAYIKIPNAGQMQPVKAFKIHNRIWVIPERDTFTNPEEGDLNPPPEAKQVPVSYYDSTYLSTDNEKDNYLKGVTKLFERIYSTDLGRMLLTSIVRGIPFWGGSTIDTELKVIDTNCINVIQPDGSYRSEELNLVIIGPSADIIQFECKSFGHEVLNLTRNGYGSTQYIRFSPDFTFGFEESLEVDTNPLLGAGKFATDPAVTLAHELIHAGHRLYGIAINPNRVFKVNTNAYYEMSGLEVSFEELRTFGGHDAKFIDSLQENEFRLYYYNKFKDIASTLNKAKSIVGTTASLQYMKNVFKEKYLLSEDTSGKFSVDKLKFDKLYKMLTEIYTEDNFVKFFKVLNRKTYLNFDKAVFKINIVPKVNYTIYDGFNLRNTNLAANFNGQNTEINNMNFTKLKNFTGLFEFYKLLCVRGIITSKTKSLDKGYNKALNDLCIKVNNWDLFFSPSEDNFTNDLNKGEEITSDTNIEAAEENISLDLIQQYYLTFNFDNEPENISIENLSSDIIGQLELMPNIERFPNGKKYELDKYTMFHYLRAQEFEHGKSRIALTNSVNEALLNPSRVYTFFSSDYVKKVNKATEAAMFLGWVEQLVYDFTDETSEVSTTDKIADITIIIPYIGPALNIGNMLYKDDFVGALIFSGAVILLEFIPEIAIPVLGTFALVSYIANKVLTVQTIDNALSKRNEKWDEVYKYIVTNWLAKVNTQIDLIRKKMKEALENQAEATKAIINYQYNQYTEEEKNNINFNIDDLSSKLNESINKAMININKFLNQCSVSYLMNSMIPYGVKRLEDFDASLKDALLKYIYDNRGTLIGQVDRLKDKVNNTLSTDIPFQLSKYVDNQRLLSTFTEYIKN

SEQ ID NO: 47 - protein, 872 aa, Artificial Sequence
  Synthetic
MPFVNKQFNYKDPVNGVDIAYIKIPNAGQMQPVKAFKIHNKIWVIPERDTFTNPEEGDLNPPPEAKQVPVSYYDSTYLSTDNEKDNYLKGVTKLFERIYSTDLGRMLLTSIVRGIPFWGGSTIDTELKVIDTNCINVIQPDGSYRSEELNLVIIGPSADIIQFECKSFGHEVLNLTRNGYGSTQYIRFSPDFTFGFEESLEVDTNPLLGAGRFATDPAVTLAHELIHAGHRLYGIAINPNRVFKVNTNAYYEMSGLEVSFEELRTFGGHDAKFIDSLQENEFRLYYYNKFKDIASTLNKAKSIVGTTASLQYMKNVFKEKYLLSEDTSGKFSVDKLKFDKLYKMLTEIYTEDNFVKFFKVLNRKTYLNFDKAVFKINIVPKVNYTIYDGFNLRNTNLAANFNGQNTEINNMNFTKLKNFTGLFEFYKLLCVRGIITSKTKSLDKGYNKALNDLCIKVNNWDLFFSPSEDNFTNDLNKGEEITSDTNIEAAEENISLDLIQQYYLTFNFDNEPENISIENLSSDIIGQLELMPNIERFPNGKKYELDKYTMFHYLRAQEFEHGKSRIALTNSVNEALLNPSRVYTFFSSDYVKKVNKATEAAMFLGWVEQLVYDFTDETSEVSTTDKIADITIIIPYIGPALNIGNMLYKDDFVGALIFSGAVILLEFIPEIAIPVLGTFALVSYIANKVLTVQTIDNALSKRNEKWDEVYKYIVTNWLAKVNTQIDLIRKKMKEALENQAEATKAIINYQYNQYTEEEKNNINFNIDDLSSKLNESINKAMININKFLNQCSVSYLMNSMIPYGVKRLEDFDASLKDALLKYIYDNRGTLIGQVDRLKDKVNNTLSTDIPFQLSKYVDNQRLLSTFTEYIKN

SEQ ID NO: 48 - protein, 872 aa, Artificial Sequence
  Synthetic
MPFVNKQFNYKDPVNGVDIAYIKIPNAGQMQPVKAFKIHNKIWVIPERDTFTNPEEGDLNPPPEAKQVPVSYYDSTYLSTDNEKDNYLKGVTKLFERIYSTDLGRMLLTSIVRGIPFWGGSTIDTELKVIDTNCINVIQPDGSYRSEELNLVIIGPSADIIQFECKSFGHEVLNLTRNGYGSTQYIRFSPDFTFGFEESLEVDTNPLLGAGKFATDPAVTLAHELIHAGHRLYGIAINPNRVFKVNTNAYYEMSGLEVSFEELRTFGGHDARFIDSLQENEFRLYYYNKFKDIASTLNKAKSIVGTTASLQYMKNVFKEKYLLSEDTSGKFSVDKLKFDKLYKMLTEIYTEDNFVKFFKVLNRKTYLNFDKAVFKINIVPKVNYTIYDGFNLRNTNLAANFNGQNTEINNMNFTKLKNFTGLFEFYKLLCVRGIITSKTKSLDKGYNKALNDLCIKVNNWDLFFSPSEDNFTNDLNKGEEITSDTNIEAAEENISLDLIQQYYLTFNFDNEPENISIENLSSDIIGQLELMPNIERFPNGKKYELDKYTMFHYLRAQEFEHGKSRIALTNSVNEALLNPSRVYTFFSSDYVKKVNKATEAAMFLGWVEQLVYDFTDETSEVSTTDKIADITIIIPYIGPALNIGNMLYKDDFVGALIFSGAVILLEFIPEIAIPVLGTFALVSYIANKVLTVQTIDNALSKRNEKWDEVYKYIVTNWLAKVNTQIDLIRKKMKEALENQAEATKAIINYQYNQYTEEEKNNINFNIDDLSSKLNESINKAMININKFLNQCSVSYLMNSMIPYGVKRLEDFDASLKDALLKYIYDNRGTLIGQVDRLKDKVNNTLSTDIPFQLSKYVDNQRLLSTFTEYIKN

SEQ ID NO: 49 - protein, 872 aa, Artificial Sequence
  Synthetic
MPFVNKQFNYKDPVNGVDIAYIKIPNAGQMQPVKAFKIHNKIWVIPERDTFTNPEEGDLNPPPEAKQVPVSYYDSTYLSTDNEKDNYLKGVTKLFERIYSTDLGRMLLTSIVRGIPFWGGSTIDTELKVIDTNCINVIQPDGSYRSEELNLVIIGPSADIIQFECKSFGHEVLNLTRNGYGSTQYIRFSPDFTFGFEESLEVDTNPLLGAGKFATDPAVTLAHELIHAGHRLYGIAINPNRVFKVNTNAYYEMSGLEVSFEELRTFGGHDAKFIDSLQENEFRLYYYNRFKDIASTLNKAKSIVGTTASLQYMKNVFKEKYLLSEDTSGKFSVDKLKFDKLYKMLTEIYTEDNFVKFFKVLNRKTYLNFDKAVFKINIVPKVNYTIYDGFNLRNTNLAANFNGQNTEINNMNFTKLKNFTGLFEFYKLLCVRGIITSKTKSLDKGYNKALNDLCIKVNNWDLFFSPSEDNFTNDLNKGEEITSDTNIEAAEENISLDLIQQYYLTFNFDNEPENISIENLSSDIIGQLELMPNIERFPNGKKYELDKYTMFHYLRAQEFEHGKSRIALTNSVNEALLNPSRVYTFFSSDYVKKVNKATEAAMFLGWVEQLVYDFTDETSEVSTTDKIADITIIIPYIGPALNIGNMLYKDDFVGALIFSGAVILLEFIPEIAIPVLGTFALVSYIANKVLTVQTIDNALSKRNEKWDEVYKYIVTNWLAKVNTQIDLIRKKMKEALENQAEATKAIINYQYNQYTEEEKNNINFNIDDLSSKLNESINKAMININKFLNQCSVSYLMNSMIPYGVKRLEDFDASLKDALLKYIYDNRGTLIGQVDRLKDKVNNTLSTDIPFQLSKYVDNQRLLSTFTEYIKN

SEQ ID NO: 50 - protein, 872 aa, Artificial Sequence
  Synthetic
MPFVNKQFNYKDPVNGVDIAYIKIPNAGQMQPVKAFKIHNKIWVIPERDTFTNPEEGDLNPPPEAKQVPVSYYDSTYLSTDNEKDNYLKGVTKLFERIYSTDLGRMLLTSIVRGIPFWGGSTIDTELKVIDTNCINVIQPDGSYRSEELNLVIIGPSADIIQFECKSFGHEVLNLTRNGYGSTQYIRFSPDFTFGFEESLEVDTNPLLGAGKFATDPAVTLAHELIHAGHRLYGIAINPNRVFKVNTNAYYEMSGLEVSFEELRTFGGHDAKFIDSLQENEFRLYYYNKFRDIASTLNKAKSIVGTTASLQYMKNVFKEKYLLSEDTSGKFSVDKLKFDKLYKMLTEIYTEDNFVKFFKVLNRKTYLNFDKAVFKINIVPKVNYTIYDGFNLRNTNLAANFNGQNTEINNMNFTKLKNFTGLFEFYKLLCVRGIITSKTKSLDKGYNKALNDLCIKVNNWDLFFSPSEDNFTNDLNKGEEITSDTNIEAAEENISLDLIQQYYLTFNFDNEPENISIENLSSDIIGQLELMPNIERFPNGKKYELDKYTMFHYLRAQEFEHGKSRIALTNSVNEALLNPSRVYTFFSSDYVKKVNKATEAAMFLGWVEQLVYDFTDETSEVSTTDKIADITIIIPYIGPALNIGNMLYKDDFVGALIFSGAVILLEFIPEIAIPVLGTFALVSYIANKVLTVQTIDNALSKRNEKWDEVYKYIVTNWLAKVNTQIDLIRKKMKEALENQAEATKAIINYQYNQYTEEEKNNINFNIDDLSSKLNESINKAMININKFLNQCSVSYLMNSMIPYGVKRLEDFDASLKDALLKYIYDNRGTLIGQVDRLKDKVNNTLSTDIPFQLSKYVDNQRLLSTFTEYIKN

SEQ ID NO: 51 - protein, 872 aa, Artificial Sequence
  Synthetic
MPFVNKQFNYKDPVNGVDIAYIKIPNAGQMQPVKAFKIHNKIWVIPERDTFTNPEEGDLNPPPEAKQVPVSYYDSTYLSTDNEKDNYLKGVTKLFERIYSTDLGRMLLTSIVRGIPFWGGSTIDTELKVIDTNCINVIQPDGSYRSEELNLVIIGPSADIIQFECKSFGHEVLNLTRNGYGSTQYIRFSPDFTFGFEESLEVDTNPLLGAGKFATDPAVTLAHELIHAGHRLYGIAINPNRVFKVNTNAYYEMSGLEVSFEELRTFGGHDAKFIDSLQENEFRLYYYNKFKDIASTLNRAKSIVGTTASLQYMKNVFKEKYLLSEDTSGKFSVDKLKFDKLYKMLTEIYTEDNFVKFFKVLNRKTYLNFDKAVFKINIVPKVNYTIYDGFNLRNTNLAANFNGQNTEINNMNFTKLKNFTGLFEFYKLLCVRGIITSKTKSLDKGYNKALNDLCIKVNNWDLFFSPSEDNFTNDLNKGEEITSDTNIEAAEENISLDLIQQYYLTFNFDNEPENISIENLSSDIIGQLELMPNIERFPNGKKYELDKYTMFHYLRAQEFEHGKSRIALTNSVNEALLNPSRVYTFFSSDYVKKVNKATEAAMFLGWVEQLVYDFTDETSEVSTTDKIADITIIIPYIGPALNIGNMLYKDDFVGALIFSGAVILLEFIPEIAIPVLGTFALVSYIANKVLTVQTIDNALSKRNEKWDEVYKYIVTNWLAKVNTQIDLIRKKMKEALENQAEATKAIINYQYNQYTEEEKNNINFNIDDLSSKLNESINKAMININKFLNQCSVSYLMNSMIPYGVKRLEDFDASLKDALLKYIYDNRGTLIGQVDRLKDKVNNTLSTDIPFQLSKYVDNQRLLSTFTEYIKN

SEQ ID NO: 52 - protein, 872 aa, Artificial Sequence
  Synthetic
MPFVNKQFNYKDPVNGVDIAYIKIPNAGQMQPVKAFKIHNKIWVIPERDTFTNPEEGDLNPPPEAKQVPVSYYDSTYLSTDNEKDNYLKGVTKLFERIYSTDLGRMLLTSIVRGIPFWGGSTIDTELKVIDTNCINVIQPDGSYRSEELNLVIIGPSADIIQFECKSFGHEVLNLTRNGYGSTQYIRFSPDFTFGFEESLEVDTNPLLGAGKFATDPAVTLAHELIHAGHRLYGIAINPNRVFKVNTNAYYEMSGLEVSFEELRTFGGHDAKFIDSLQENEFRLYYYNKFKDIASTLNKAKSIVGTTASLQYMKNVFREKYLLSEDTSGKFSVDKLKFDKLYKMLTEIYTEDNFVKFFKVLNRKTYLNFDKAVFKINIVPKVNYTIYDGFNLRNTNLAANFNGQNTEINNMNFTKLKNFTGLFEFYKLLCVRGIITSKTKSLDKGYNKALNDLCIKVNNWDLFFSPSEDNFTNDLNKGEEITSDTNIEAAEENISLDLIQQYYLTFNFDNEPENISIENLSSDIIGQLELMPNIERFPNGKKYELDKYTMFHYLRAQEFEHGKSRIALTNSVNEALLNPSRVYTFFSSDYVKKVNKATEAAMFLGWVEQLVYDFTDETSEVSTTDKIADITIIIPYIGPALNIGNMLYKDDFVGALIFSGAVILLEFIPEIAIPVLGTFALVSYIANKVLTVQTIDNALSKRNEKWDEVYKYIVTNWLAKVNTQIDLIRKKMKEALENQAEATKAIINYQYNQYTEEEKNNINFNIDDLSSKLNESINKAMININKFLNQCSVSYLMNSMIPYGVKRLEDFDASLKDALLKYIYDNRGTLIGQVDRLKDKVNNTLSTDIPFQLSKYVDNQRLLSTFTEYIKN

SEQ ID NO: 53 - protein, 872 aa, Artificial Sequence
  Synthetic
MPFVNKQFNYKDPVNGVDIAYIKIPNAGQMQPVKAFKIHNKIWVIPERDTFTNPEEGDLNPPPEAKQVPVSYYDSTYLSTDNEKDNYLKGVTKLFERIYSTDLGRMLLTSIVRGIPFWGGSTIDTELKVIDTNCINVIQPDGSYRSEELNLVIIGPSADIIQFECKSFGHEVLNLTRNGYGSTQYIRFSPDFTFGFEESLEVDTNPLLGAGKFATDPAVTLAHELIHAGHRLYGIAINPNRVFKVNTNAYYEMSGLEVSFEELRTFGGHDAKFIDSLQENEFRLYYYNKFKDIASTLNKAKSIVGTTASLQYMKNVFKEKYLLSEDTSGKFSVDRLKFDKLYKMLTEIYTEDNFVKFFKVLNRKTYLNFDKAVFKINIVPKVNYTIYDGFNLRNTNLAANFNGQNTEINNMNFTKLKNFTGLFEFYKLLCVRGIITSKTKSLDKGYNKALNDLCIKVNNWDLFFSPSEDNFTNDLNKGEEITSDTNIEAAEENISLDLIQQYYLTFNFDNEPENISIENLSSDIIGQLELMPNIERFPNGKKYELDKYTMFHYLRAQEFEHGKSRIALTNSVNEALLNPSRVYTFFSSDYVKKVNKATEAAMFLGWVEQLVYDFTDETSEVSTTDKIADITIIIPYIGPALNIGNMLYKDDFVGALIFSGAVILLEFIPEIAIPVLGTFALVSYIANKVLTVQTIDNALSKRNEKWDEVYKYIVTNWLAKVNTQIDLIRKKMKEALENQAEATKAIINYQYNQYTEEEKNNINFNIDDLSSKLNESINKAMININKFLNQCSVSYLMNSMIPYGVKRLEDFDASLKDALLKYIYDNRGTLIGQVDRLKDKVNNTLSTDIPFQLSKYVDNQRLLSTFTEYIKN

SEQ ID NO: 54 - protein, 872 aa, Artificial Sequence
  Synthetic
MPFVNKQFNYKDPVNGVDIAYIKIPNAGQMQPVKAFKIHNKIWVIPERDTFTNPEEGDLNPPPEAKQVPVSYYDSTYLSTDNEKDNYLKGVTKLFERIYSTDLGRMLLTSIVRGIPFWGGSTIDTELKVIDTNCINVIQPDGSYRSEELNLVIIGPSADIIQFECKSFGHEVLNLTRNGYGSTQYIRFSPDFTFGFEESLEVDTNPLLGAGKFATDPAVTLAHELIHAGHRLYGIAINPNRVFKVNTNAYYEMSGLEVSFEELRTFGGHDAKFIDSLQENEFRLYYYNKFKDIASTLNKAKSIVGTTASLQYMKNVFKEKYLLSEDTSGKFSVDKLRFDKLYKMLTEIYTEDNFVKFFKVLNRKTYLNFDKAVFKINIVPKVNYTIYDGFNLRNTNLAANFNGQNTEINNMNFTKLKNFTGLFEFYKLLCVRGIITSKTKSLDKGYNKALNDLCIKVNNWDLFFSPSEDNFTNDLNKGEEITSDTNIEAAEENISLDLIQQYYLTFNFDNEPENISIENLSSDIIGQLELMPNIERFPNGKKYELDKYTMFHYLRAQEFEHGKSRIALTNSVNEALLNPSRVYTFFSSDYVKKVNKATEAAMFLGWVEQLVYDFTDETSEVSTTDKIADITIIIPYIGPALNIGNMLYKDDFVGALIFSGAVILLEFIPEIAIPVLGTFALVSYIANKVLTVQTIDNALSKRNEKWDEVYKYIVTNWLAKVNTQIDLIRKKMKEALENQAEATKAIINYQYNQYTEEEKNNINFNIDDLSSKLNESINKAMININKFLNQCSVSYLMNSMIPYGVKRLEDFDASLKDALLKYIYDNRGTLIGQVDRLKDKVNNTLSTDIPFQLSKYVDNQRLLSTFTEYIKN

SEQ ID NO: 55 - protein, 872 aa, Artificial Sequence
  Synthetic
MPFVNKQFNYKDPVNGVDIAYIKIPNAGQMQPVKAFKIHNKIWVIPERDTFTNPEEGDLNPPPEAKQVPVSYYDSTYLSTDNEKDNYLKGVTKLFERIYSTDLGRMLLTSIVRGIPFWGGSTIDTELKVIDTNCINVIQPDGSYRSEELNLVIIGPSADIIQFECKSFGHEVLNLTRNGYGSTQYIRFSPDFTFGFEESLEVDTNPLLGAGKFATDPAVTLAHELIHAGHRLYGIAINPNRVFKVNTNAYYEMSGLEVSFEELRTFGGHDAKFIDSLQENEFRLYYYNKFKDIASTLNKAKSIVGTTASLQYMKNVFKEKYLLSEDTSGKFSVDKLKFDRLYKMLTEIYTEDNFVKFFKVLNRKTYLNFDKAVFKINIVPKVNYTIYDGFNLRNTNLAANFNGQNTEINNMNFTKLKNFTGLFEFYKLLCVRGIITSKTKSLDKGYNKALNDLCIKVNNWDLFFSPSEDNFTNDLNKGEEITSDTNIEAAEENISLDLIQQYYLTFNFDNEPENISIENLSSDIIGQLELMPNIERFPNGKKYELDKYTMFHYLRAQEFEHGKSRIALTNSVNEALLNPSRVYTFFSSDYVKKVNKATEAAMFLGWVEQLVYDFTDETSEVSTTDKIADITIIIPYIGPALNIGNMLYKDDFVGALIFSGAVILLEFIPEIAIPVLGTFALVSYIANKVLTVQTIDNALSKRNEKWDEVYKYIVTNWLAKVNTQIDLIRKKMKEALENQAEATKAIINYQYNQYTEEEKNNINFNIDDLSSKLNESINKAMININKFLNQCSVSYLMNSMIPYGVKRLEDFDASLKDALLKYIYDNRGTLIGQVDRLKDKVNNTLSTDIPFQLSKYVDNQRLLSTFTEYIKN

SEQ ID NO: 56 - protein, 872 aa, Artificial Sequence
  Synthetic
MPFVNKQFNYKDPVNGVDIAYIKIPNAGQMQPVKAFKIHNKIWVIPERDTFTNPEEGDLNPPPEAKQVPVSYYDSTYLSTDNEKDNYLKGVTKLFERIYSTDLGRMLLTSIVRGIPFWGGSTIDTELKVIDTNCINVIQPDGSYRSEELNLVIIGPSADIIQFECKSFGHEVLNLTRNGYGSTQYIRFSPDFTFGFEESLEVDTNPLLGAGKFATDPAVTLAHELIHAGHRLYGIAINPNRVFKVNTNAYYEMSGLEVSFEELRTFGGHDAKFIDSLQENEFRLYYYNKFKDIASTLNKAKSIVGTTASLQYMKNVFKEKYLLSEDTSGKFSVDKLKFDKLYRMLTEIYTEDNFVKFFKVLNRKTYLNFDKAVFKINIVPKVNYTIYDGFNLRNTNLAANFNGQNTEINNMNFTKLKNFTGLFEFYKLLCVRGIITSKTKSLDKGYNKALNDLCIKVNNWDLFFSPSEDNFTNDLNKGEEITSDTNIEAAEENISLDLIQQYYLTFNFDNEPENISIENLSSDIIGQLELMPNIERFPNGKKYELDKYTMFHYLRAQEFEHGKSRIALTNSVNEALLNPSRVYTFFSSDYVKKVNKATEAAMFLGWVEQLVYDFTDETSEVSTTDKIADITIIIPYIGPALNIGNMLYKDDFVGALIFSGAVILLEFIPEIAIPVLGTFALVSYIANKVLTVQTIDNALSKRNEKWDEVYKYIVTNWLAKVNTQIDLIRKKMKEALENQAEATKAIINYQYNQYTEEEKNNINFNIDDLSSKLNESINKAMININKFLNQCSVSYLMNSMIPYGVKRLEDFDASLKDALLKYIYDNRGTLIGQVDRLKDKVNNTLSTDIPFQLSKYVDNQRLLSTFTEYIKN

SEQ ID NO: 57 - protein, 872 aa, Artificial Sequence
  Synthetic
MPFVNKQFNYKDPVNGVDIAYIKIPNAGQMQPVKAFKIHNKIWVIPERDTFTNPEEGDLNPPPEAKQVPVSYYDSTYLSTDNEKDNYLKGVTKLFERIYSTDLGRMLLTSIVRGIPFWGGSTIDTELKVIDTNCINVIQPDGSYRSEELNLVIIGPSADIIQFECKSFGHEVLNLTRNGYGSTQYIRFSPDFTFGFEESLEVDTNPLLGAGKFATDPAVTLAHELIHAGHRLYGIAINPNRVFKVNTNAYYEMSGLEVSFEELRTFGGHDAKFIDSLQENEFRLYYYNKFKDIASTLNKAKSIVGTTASLQYMKNVFKEKYLLSEDTSGKFSVDKLKFDKLYKMLTEIYTEDNFVRFFKVLNRKTYLNFDKAVFKINIVPKVNYTIYDGFNLRNTNLAANFNGQNTEINNMNFTKLKNFTGLFEFYKLLCVRGIITSKTKSLDKGYNKALNDLCIKVNNWDLFFSPSEDNFTNDLNKGEEITSDTNIEAAEENISLDLIQQYYLTFNFDNEPENISIENLSSDIIGQLELMPNIERFPNGKKYELDKYTMFHYLRAQEFEHGKSRIALTNSVNEALLNPSRVYTFFSSDYVKKVNKATEAAMFLGWVEQLVYDFTDETSEVSTTDKIADITIIIPYIGPALNIGNMLYKDDFVGALIFSGAVILLEFIPEIAIPVLGTFALVSYIANKVLTVQTIDNALSKRNEKWDEVYKYIVTNWLAKVNTQIDLIRKKMKEALENQAEATKAIINYQYNQYTEEEKNNINFNIDDLSSKLNESINKAMININKFLNQCSVSYLMNSMIPYGVKRLEDFDASLKDALLKYIYDNRGTLIGQVDRLKDKVNNTLSTDIPFQLSKYVDNQRLLSTFTEYIKN

SEQ ID NO: 58 - protein, 872 aa, Artificial Sequence
  Synthetic
MPFVNKQFNYKDPVNGVDIAYIKIPNAGQMQPVKAFKIHNKIWVIPERDTFTNPEEGDLNPPPEAKQVPVSYYDSTYLSTDNEKDNYLKGVTKLFERIYSTDLGRMLLTSIVRGIPFWGGSTIDTELKVIDTNCINVIQPDGSYRSEELNLVIIGPSADIIQFECKSFGHEVLNLTRNGYGSTQYIRFSPDFTFGFEESLEVDTNPLLGAGKFATDPAVTLAHELIHAGHRLYGIAINPNRVFKVNTNAYYEMSGLEVSFEELRTFGGHDAKFIDSLQENEFRLYYYNKFKDIASTLNKAKSIVGTTASLQYMKNVFKEKYLLSEDTSGKFSVDKLKFDKLYKMLTEIYTEDNFVKFFKVLNRKTYLNFDKAVFRINIVPKVNYTIYDGFNLRNTNLAANFNGQNTEINNMNFTKLKNFTGLFEFYKLLCVRGIITSKTKSLDKGYNKALNDLCIKVNNWDLFFSPSEDNFTNDLNKGEEITSDTNIEAAEENISLDLIQQYYLTFNFDNEPENISIENLSSDIIGQLELMPNIERFPNGKKYELDKYTMFHYLRAQEFEHGKSRIALTNSVNEALLNPSRVYTFFSSDYVKKVNKATEAAMFLGWVEQLVYDFTDETSEVSTTDKIADITIIIPYIGPALNIGNMLYKDDFVGALIFSGAVILLEFIPEIAIPVLGTFALVSYIANKVLTVQTIDNALSKRNEKWDEVYKYIVTNWLAKVNTQIDLIRKKMKEALENQAEATKAIINYQYNQYTEEEKNNINFNIDDLSSKLNESINKAMININKFLNQCSVSYLMNSMIPYGVKRLEDFDASLKDALLKYIYDNRGTLIGQVDRLKDKVNNTLSTDIPFQLSKYVDNQRLLSTFTEYIKN

SEQ ID NO: 59 - protein, 872 aa, Artificial Sequence
  Synthetic
MPFVNKQFNYKDPVNGVDIAYIKIPNAGQMQPVKAFKIHNKIWVIPERDTFTNPEEGDLNPPPEAKQVPVSYYDSTYLSTDNEKDNYLKGVTKLFERIYSTDLGRMLLTSIVRGIPFWGGSTIDTELKVIDTNCINVIQPDGSYRSEELNLVIIGPSADIIQFECKSFGHEVLNLTRNGYGSTQYIRFSPDFTFGFEESLEVDTNPLLGAGKFATDPAVTLAHELIHAGHRLYGIAINPNRVFKVNTNAYYEMSGLEVSFEELRTFGGHDAKFIDSLQENEFRLYYYNKFKDIASTLNKAKSIVGTTASLQYMKNVFKEKYLLSEDTSGKFSVDKLKFDKLYKMLTEIYTEDNFVKFFKVLNRKTYLNFDKAVFKINIVPRVNYTIYDGFNLRNTNLAANFNGQNTEINNMNFTKLKNFTGLFEFYKLLCVRGIITSKTKSLDKGYNKALNDLCIKVNNWDLFFSPSEDNFTNDLNKGEEITSDTNIEAAEENISLDLIQQYYLTFNFDNEPENISIENLSSDIIGQLELMPNIERFPNGKKYELDKYTMFHYLRAQEFEHGKSRIALTNSVNEALLNPSRVYTFFSSDYVKKVNKATEAAMFLGWVEQLVYDFTDETSEVSTTDKIADITIIIPYIGPALNIGNMLYKDDFVGALIFSGAVILLEFIPEIAIPVLGTFALVSYIANKVLTVQTIDNALSKRNEKWDEVYKYIVTNWLAKVNTQIDLIRKKMKEALENQAEATKAIINYQYNQYTEEEKNNINFNIDDLSSKLNESINKAMININKFLNQCSVSYLMNSMIPYGVKRLEDFDASLKDALLKYIYDNRGTLIGQVDRLKDKVNNTLSTDIPFQLSKYVDNQRLLSTFTEYIKN

SEQ ID NO: 60 - protein, 872 aa, Artificial Sequence
  Synthetic
MPFVNKQFNYKDPVNGVDIAYIKIPNAGQMQPVKAFKIHNKIWVIPERDTFTNPEEGDLNPPPEAKQVPVSYYDSTYLSTDNEKDNYLKGVTKLFERIYSTDLGRMLLTSIVRGIPFWGGSTIDTELKVIDTNCINVIQPDGSYRSEELNLVIIGPSADIIQFECKSFGHEVLNLTRNGYGSTQYIRFSPDFTFGFEESLEVDTNPLLGAGKFATDPAVTLAHELIHAGHRLYGIAINPNRVFKVNTNAYYEMSGLEVSFEELRTFGGHDAKFIDSLQENEFRLYYYNKFKDIASTLNKAKSIVGTTASLQYMKNVFKEKYLLSEDTSGKFSVDKLKFDKLYKMLTEIYTEDNFVKFFKVLNRKTYLNFDKAVFKINIVPKVNYTIRDGFNLRNTNLAANFNGQNTEINNMNFTKLKNFTGLFEFYKLLCVRGIITSKTKSLDKGYNKALNDLCIKVNNWDLFFSPSEDNFTNDLNKGEEITSDTNIEAAEENISLDLIQQYYLTFNFDNEPENISIENLSSDIIGQLELMPNIERFPNGKKYELDKYTMFHYLRAQEFEHGKSRIALTNSVNEALLNPSRVYTFFSSDYVKKVNKATEAAMFLGWVEQLVYDFTDETSEVSTTDKIADITIIIPYIGPALNIGNMLYKDDFVGALIFSGAVILLEFIPEIAIPVLGTFALVSYIANKVLTVQTIDNALSKRNEKWDEVYKYIVTNWLAKVNTQIDLIRKKMKEALENQAEATKAIINYQYNQYTEEEKNNINFNIDDLSSKLNESINKAMININKFLNQCSVSYLMNSMIPYGVKRLEDFDASLKDALLKYIYDNRGTLIGQVDRLKDKVNNTLSTDIPFQLSKYVDNQRLLSTFTEYIKN

SEQ ID NO: 61 - protein, 872 aa, Artificial Sequence
  Synthetic
MPFVNKQFNYKDPVNGVDIAYIKIPNAGQMQPVKAFKIHNKIWVIPERDTFTNPEEGDLNPPPEAKQVPVSYYDSTYLSTDNEKDNYLKGVTKLFERIYSTDLGRMLLTSIVRGIPFWGGSTIDTELKVIDTNCINVIQPDGSYRSEELNLVIIGPSADIIQFECKSFGHEVLNLTRNGYGSTQYIRFSPDFTFGFEESLEVDTNPLLGAGKFATDPAVTLAHELIHAGHRLYGIAINPNRVFKVNTNAYYEMSGLEVSFEELRTFGGHDAKFIDSLQENEFRLYYYNKFKDIASTLNKAKSIVGTTASLQYMKNVFKEKYLLSEDTSGKFSVDKLKFDKLYKMLTEIYTEDNFVKFFKVLNRKTYLNFDKAVFKINIVPKVNYTIYDGFNLRNTNLAANFNGQNTEINNRNFTKLKNFTGLFEFYKLLCVRGIITSKTKSLDKGYNKALNDLCIKVNNWDLFFSPSEDNFTNDLNKGEEITSDTNIEAAEENISLDLIQQYYLTFNFDNEPENISIENLSSDIIGQLELMPNIERFPNGKKYELDKYTMFHYLRAQEFEHGKSRIALTNSVNEALLNPSRVYTFFSSDYVKKVNKATEAAMFLGWVEQLVYDFTDETSEVSTTDKIADITIIIPYIGPALNIGNMLYKDDFVGALIFSGAVILLEFIPEIAIPVLGTFALVSYIANKVLTVQTIDNALSKRNEKWDEVYKYIVTNWLAKVNTQIDLIRKKMKEALENQAEATKAIINYQYNQYTEEEKNNINFNIDDLSSKLNESINKAMININKFLNQCSVSYLMNSMIPYGVKRLEDFDASLKDALLKYIYDNRGTLIGQVDRLKDKVNNTLSTDIPFQLSKYVDNQRLLSTFTEYIKN

SEQ ID NO: 62 - protein, 872 aa, Artificial Sequence
  Synthetic
MPFVNKQFNYKDPVNGVDIAYIKIPNAGQMQPVKAFKIHNKIWVIPERDTFTNPEEGDLNPPPEAKQVPVSYYDSTYLSTDNEKDNYLKGVTKLFERIYSTDLGRMLLTSIVRGIPFWGGSTIDTELKVIDTNCINVIQPDGSYRSEELNLVIIGPSADIIQFECKSFGHEVLNLTRNGYGSTQYIRFSPDFTFGFEESLEVDTNPLLGAGKFATDPAVTLAHELIHAGHRLYGIAINPNRVFKVNTNAYYEMSGLEVSFEELRTFGGHDAKFIDSLQENEFRLYYYNKFKDIASTLNKAKSIVGTTASLQYMKNVFKEKYLLSEDTSGKFSVDKLKFDKLYKMLTEIYTEDNFVKFFKVLNRKTYLNFDKAVFKINIVPKVNYTIYDGFNLRNTNLAANFNGQNTEINNMNFTRLKNFTGLFEFYKLLCVRGIITSKTKSLDKGYNKALNDLCIKVNNWDLFFSPSEDNFTNDLNKGEEITSDTNIEAAEENISLDLIQQYYLTFNFDNEPENISIENLSSDIIGQLELMPNIERFPNGKKYELDKYTMFHYLRAQEFEHGKSRIALTNSVNEALLNPSRVYTFFSSDYVKKVNKATEAAMFLGWVEQLVYDFTDETSEVSTTDKIADITIIIPYIGPALNIGNMLYKDDFVGALIFSGAVILLEFIPEIAIPVLGTFALVSYIANKVLTVQTIDNALSKRNEKWDEVYKYIVTNWLAKVNTQIDLIRKKMKEALENQAEATKAIINYQYNQYTEEEKNNINFNIDDLSSKLNESINKAMININKFLNQCSVSYLMNSMIPYGVKRLEDFDASLKDALLKYIYDNRGTLIGQVDRLKDKVNNTLSTDIPFQLSKYVDNQRLLSTFTEYIKN

SEQ ID NO: 63 - protein, 872 aa, Artificial Sequence
  Synthetic
MPFVNKQFNYRDPVNGVDIAYIKIPNAGQMQPVKAFKIHNKIWVIPERDTFTNPEEGDLNPPPEAKQVPVSYYDSTYLSTDNEKDNYLKGVTKLFERIYSTDLGRMLLTSIVRGIPFWGGSTIDTELKVIDTNCINVIQPDGSYRSEELNLVIIGPSADIIQFECKSFGHEVLNLTRNGYGSTQYIRFSPDFTFGFEESLEVDTNPLLGAGKFATDPAVTLAHELIHAGHRLYGIAINPNRVFKVNTNAYYEMSGLEVSFEELRTFGGHDAKFIDSLQENEFRLYYYNKFKDIASTLNKAKSIVGTTASLQYMKNVFKEKYLLSEDTSGKFSVDRLRFDKLYRMLTEIYTEDNFVKFFKVLNRKTYLNFDKAVFRINIVPKVNYTIYDGFNLRNTNLAANFNGQNTEINNMNFTRLKNFTGLFEFYKLLCVRGIITSKTKSLDKGYNKALNDLCIKVNNWDLFFSPSEDNFTNDLNKGEEITSDTNIEAAEENISLDLIQQYYLTFNFDNEPENISIENLSSDIIGQLELMPNIERFPNGKKYELDKYTMFHYLRAQEFEHGKSRIALTNSVNEALLNPSRVYTFFSSDYVKKVNKATEAAMFLGWVEQLVYDFTDETSEVSTTDKIADITIIIPYIGPALNIGNMLYKDDFVGALIFSGAVILLEFIPEIAIPVLGTFALVSYIANKVLTVQTIDNALSKRNEKWDEVYKYIVTNWLAKVNTQIDLIRKKMKEALENQAEATKAIINYQYNQYTEEEKNNINFNIDDLSSKLNESINKAMININKFLNQCSVSYLMNSMIPYGVKRLEDFDASLKDALLKYIYDNRGTLIGQVDRLKDKVNNTLSTDIPFQLSKYVDNQRLLSTFTEYIKN

SEQ ID NO: 64 - protein, 872 aa, Artificial Sequence
  Synthetic
MPFVNKQFNYKDPVNGVDIAYIKIPNAGQMQPVKAFKIHNRIWVIPERDTFTNPEEGDLNPPPEAKQVPVSYYDSTYLSTDNEKDNYLKGVTKLFERIYSTDLGRMLLTSIVRGIPFWGGSTIDTELKVIDTNCINVIQPDGSYRSEELNLVIIGPSADIIQFECKSFGHEVLNLTRNGYGSTQYIRFSPDFTFGFEESLEVDTNPLLGAGKFATDPAVTLAHELIHAGHRLYGIAINPNRVFKVNTNAYYEMSGLEVSFEELRTFGGHDAKFIDSLQENEFRLYYYNKFKDIASTLNKAKSIVGTTASLQYMKNVFREKYLLSEDTSGKFSVDKLKFDRLYKMLTEIYTEDNFVKFFKVLNRKTYLNFDKAVFKINIVPKVNYTIYDGFNLRNTNLAANFNGQNTEINNMNFTKLKNFTGLFEFYKLLCVRGIITSKTKSLDKGYNKALNDLCIKVNNWDLFFSPSEDNFTNDLNKGEEITSDTNIEAAEENISLDLIQQYYLTFNFDNEPENISIENLSSDIIGQLELMPNIERFPNGKKYELDKYTMFHYLRAQEFEHGKSRIALTNSVNEALLNPSRVYTFFSSDYVKKVNKATEAAMFLGWVEQLVYDFTDETSEVSTTDKIADITIIIPYIGPALNIGNMLYKDDFVGALIFSGAVILLEFIPEIAIPVLGTFALVSYIANKVLTVQTIDNALSKRNEKWDEVYKYIVTNWLAKVNTQIDLIRKKMKEALENQAEATKAIINYQYNQYTEEEKNNINFNIDDLSSKLNESINKAMININKFLNQCSVSYLMNSMIPYGVKRLEDFDASLKDALLKYIYDNRGTLIGQVDRLKDKVNNTLSTDIPFQLSKYVDNQRLLSTFTEYIKN

SEQ ID NO: 65 - protein, 872 aa, Artificial Sequence
  Synthetic
MPFVNKQFNYKDPVNGVDIAYIKIPNAGQMQPVKAFKIHNKIWVIPERDTFTNPEEGDLNPPPEAKQVPVSYYDSTYLSTDNEKDNYLKGVTKLFERIYSTDLGRMLLTSIVRGIPFWGGSTIDTELKVIDTNCINVIQPDGSYRSEELNLVIIGPSADIIQFECKSFGHEVLNLTRNGYGSTQYIRFSPDFTFGFEESLEVDTNPLLGAGKFATDPAVTLAHELIHAGHRLYGIAINPNRVFKVNTNAYYEMSGLEVSFEELRTFGGHDAKFIDSLQENEFRLYYYNRFRDIASTLNRAKSIVGTTASLQYMKNVFKEKYLLSEDTSGKFSVDKLKFDKLYKMLTEIYTEDNFVKFFKVLNRKTYLNFDKAVFKINIVPRVNYTIYDGFNLRNTNLAANFNGQNTEINNMNFTKLKNFTGLFEFYKLLCVRGIITSKTKSLDKGYNKALNDLCIKVNNWDLFFSPSEDNFTNDLNKGEEITSDTNIEAAEENISLDLIQQYYLTFNFDNEPENISIENLSSDIIGQLELMPNIERFPNGKKYELDKYTMFHYLRAQEFEHGKSRIALTNSVNEALLNPSRVYTFFSSDYVKKVNKATEAAMFLGWVEQLVYDFTDETSEVSTTDKIADITIIIPYIGPALNIGNMLYKDDFVGALIFSGAVILLEFIPEIAIPVLGTFALVSYIANKVLTVQTIDNALSKRNEKWDEVYKYIVTNWLAKVNTQIDLIRKKMKEALENQAEATKAIINYQYNQYTEEEKNNINFNIDDLSSKLNESINKAMININKFLNQCSVSYLMNSMIPYGVKRLEDFDASLKDALLKYIYDNRGTLIGQVDRLKDKVNNTLSTDIPFQLSKYVDNQRLLSTFTEYIKN

SEQ ID NO: 66 - protein, 872 aa, Artificial Sequence
  Synthetic
MPFVNKQFNYKDPVNGVDIAYIKIPNAGQMQPVKAFKIHNKIWVIPERDTFTNPEEGDLNPPPEAKQVPVSYYDSTYLSTDNEKDNYLKGVTKLFERIYSTDLGRMLLTSIVRGIPFWGGSTIDTELKVIDTNCINVIQPDGSYRSEELNLVIIGPSADIIQFECKSFGHEVLNLTRNGYGSTQYIRFSPDFTFGFEESLEVDTNPLLGAGRFATDPAVTLAHELIHAGHRLYGIAINPNRVFKVNTNAYYEMSGLEVSFEELRTFGGHDARFIDSLQENEFRLYYYNKFKDIASTLNKAKSIVGTTASLQYMKNVFKEKYLLSEDTSGKFSVDKLKFDKLYKMLTEIYTEDNFVRFFKVLNRKTYLNFDKAVFKINIVPKVNYTIYDGFNLRNTNLAANFNGQNTEINNMNFTKLKNFTGLFEFYKLLCVRGIITSKTKSLDKGYNKALNDLCIKVNNWDLFFSPSEDNFTNDLNKGEEITSDTNIEAAEENISLDLIQQYYLTFNFDNEPENISIENLSSDIIGQLELMPNIERFPNGKKYELDKYTMFHYLRAQEFEHGKSRIALTNSVNEALLNPSRVYTFFSSDYVKKVNKATEAAMFLGWVEQLVYDFTDETSEVSTTDKIADITIIIPYIGPALNIGNMLYKDDFVGALIFSGAVILLEFIPEIAIPVLGTFALVSYIANKVLTVQTIDNALSKRNEKWDEVYKYIVTNWLAKVNTQIDLIRKKMKEALENQAEATKAIINYQYNQYTEEEKNNINFNIDDLSSKLNESINKAMININKFLNQCSVSYLMNSMIPYGVKRLEDFDASLKDALLKYIYDNRGTLIGQVDRLKDKVNNTLSTDIPFQLSKYVDNQRLLSTFTEYIKN

SEQ ID NO: 67 - protein, 872 aa, Artificial Sequence
  Synthetic
MPFVNKQFNYRDPVNGVDIAYIKIPNAGQMQPVKAFKIHNRIWVIPERDTFTNPEEGDLNPPPEAKQVPVSYYDSTYLSTDNEKDNYLKGVTKLFERIYSTDLGRMLLTSIVRGIPFWGGSTIDTELKVIDTNCINVIQPDGSYRSEELNLVIIGPSADIIQFECKSFGHEVLNLTRNGYGSTQYIRFSPDFTFGFEESLEVDTNPLLGAGKFATDPAVTLAHELIHAGHRLYGIAINPNRVFKVNTNAYYEMSGLEVSFEELRTFGGHDAKFIDSLQENEFRLYYYNKFKDIASTLNKAKSIVGTTASLQYMKNVFREKYLLSEDTSGKFSVDRLRFDRLYRMLTEIYTEDNFVKFFKVLNRKTYLNFDKAVFRINIVPKVNYTIYDGFNLRNTNLAANFNGQNTEINNMNFTRLKNFTGLFEFYKLLCVRGIITSKTKSLDKGYNKALNDLCIKVNNWDLFFSPSEDNFTNDLNKGEEITSDTNIEAAEENISLDLIQQYYLTFNFDNEPENISIENLSSDIIGQLELMPNIERFPNGKKYELDKYTMFHYLRAQEFEHGKSRIALTNSVNEALLNPSRVYTFFSSDYVKKVNKATEAAMFLGWVEQLVYDFTDETSEVSTTDKIADITIIIPYIGPALNIGNMLYKDDFVGALIFSGAVILLEFIPEIAIPVLGTFALVSYIANKVLTVQTIDNALSKRNEKWDEVYKYIVTNWLAKVNTQIDLIRKKMKEALENQAEATKAIINYQYNQYTEEEKNNINFNIDDLSSKLNESINKAMININKFLNQCSVSYLMNSMIPYGVKRLEDFDASLKDALLKYIYDNRGTLIGQVDRLKDKVNNTLSTDIPFQLSKYVDNQRLLSTFTEYIKN

SEQ ID NO: 68 - protein, 872 aa, Artificial Sequence
  Synthetic
MPFVNKQFNYRDPVNGVDIAYIKIPNAGQMQPVKAFKIHNKIWVIPERDTFTNPEEGDLNPPPEAKQVPVSYYDSTYLSTDNEKDNYLKGVTKLFERIYSTDLGRMLLTSIVRGIPFWGGSTIDTELKVIDTNCINVIQPDGSYRSEELNLVIIGPSADIIQFECKSFGHEVLNLTRNGYGSTQYIRFSPDFTFGFEESLEVDTNPLLGAGKFATDPAVTLAHELIHAGHRLYGIAINPNRVFKVNTNAYYEMSGLEVSFEELRTFGGHDAKFIDSLQENEFRLYYYNRFRDIASTLNRAKSIVGTTASLQYMKNVFKEKYLLSEDTSGKFSVDRLRFDKLYRMLTEIYTEDNFVKFFKVLNRKTYLNFDKAVFRINIVPRVNYTIYDGFNLRNTNLAANFNGQNTEINNMNFTRLKNFTGLFEFYKLLCVRGIITSKTKSLDKGYNKALNDLCIKVNNWDLFFSPSEDNFTNDLNKGEEITSDTNIEAAEENISLDLIQQYYLTFNFDNEPENISIENLSSDIIGQLELMPNIERFPNGKKYELDKYTMFHYLRAQEFEHGKSRIALTNSVNEALLNPSRVYTFFSSDYVKKVNKATEAAMFLGWVEQLVYDFTDETSEVSTTDKIADITIIIPYIGPALNIGNMLYKDDFVGALIFSGAVILLEFIPEIAIPVLGTFALVSYIANKVLTVQTIDNALSKRNEKWDEVYKYIVTNWLAKVNTQIDLIRKKMKEALENQAEATKAIINYQYNQYTEEEKNNINFNIDDLSSKLNESINKAMININKFLNQCSVSYLMNSMIPYGVKRLEDFDASLKDALLKYIYDNRGTLIGQVDRLKDKVNNTLSTDIPFQLSKYVDNQRLLSTFTEYIKN

SEQ ID NO: 69 - protein, 872 aa, Artificial Sequence
  Synthetic
MPFVNKQFNYRDPVNGVDIAYIKIPNAGQMQPVKAFKIHNRIWVIPERDTFTNPEEGDLNPPPEAKQVPVSYYDSTYLSTDNEKDNYLKGVTKLFERIYSTDLGRMLLTSIVRGIPFWGGSTIDTELKVIDTNCINVIQPDGSYRSEELNLVIIGPSADIIQFECKSFGHEVLNLTRNGYGSTQYIRFSPDFTFGFEESLEVDTNPLLGAGKFATDPAVTLAHELIHAGHRLYGIAINPNRVFKVNTNAYYEMSGLEVSFEELRTFGGHDAKFIDSLQENEFRLYYYNRFRDIASTLNRAKSIVGTTASLQYMKNVFKEKYLLSEDTSGKFSVDRLRFDKLYRMLTEIYTEDNFVKFFKVLNRKTYLNFDKAVFRINIVPRVNYTIYDGFNLRNTNLAANFNGQNTEINNMNFTRLKNFTGLFEFYKLLCVRGIITSKTKSLDKGYNKALNDLCIKVNNWDLFFSPSEDNFTNDLNKGEEITSDTNIEAAEENISLDLIQQYYLTFNFDNEPENISIENLSSDIIGQLELMPNIERFPNGKKYELDKYTMFHYLRAQEFEHGKSRIALTNSVNEALLNPSRVYTFFSSDYVKKVNKATEAAMFLGWVEQLVYDFTDETSEVSTTDKIADITIIIPYIGPALNIGNMLYKDDFVGALIFSGAVILLEFIPEIAIPVLGTFALVSYIANKVLTVQTIDNALSKRNEKWDEVYKYIVTNWLAKVNTQIDLIRKKMKEALENQAEATKAIINYQYNQYTEEEKNNINFNIDDLSSKLNESINKAMININKFLNQCSVSYLMNSMIPYGVKRLEDFDASLKDALLKYIYDNRGTLIGQVDRLKDKVNNTLSTDIPFQLSKYVDNQRLLSTFTEYIKN

SEQ ID NO: 70 - protein, 872 aa, Artificial Sequence
  Synthetic
MPFVNKQFNYRDPVNGVDIAYIKIPNAGQMQPVKAFKIHNKIWVIPERDTFTNPEEGDLNPPPEAKQVPVSYYDSTYLSTDNEKDNYLKGVTKLFERIYSTDLGRMLLTSIVRGIPFWGGSTIDTELKVIDTNCINVIQPDGSYRSEELNLVIIGPSADIIQFECKSFGHEVLNLTRNGYGSTQYIRFSPDFTFGFEESLEVDTNPLLGAGRFATDPAVTLAHELIHAGHRLYGIAINPNRVFKVNTNAYYEMSGLEVSFEELRTFGGHDAKFIDSLQENEFRLYYYNRFRDIASTLNRAKSIVGTTASLQYMKNVFKEKYLLSEDTSGKFSVDRLRFDKLYRMLTEIYTEDNFVKFFKVLNRKTYLNFDKAVFRINIVPRVNYTIYDGFNLRNTNLAANFNGQNTEINNMNFTRLKNFTGLFEFYKLLCVRGIITSKTKSLDKGYNKALNDLCIKVNNWDLFFSPSEDNFTNDLNKGEEITSDTNIEAAEENISLDLIQQYYLTFNFDNEPENISIENLSSDIIGQLELMPNIERFPNGKKYELDKYTMFHYLRAQEFEHGKSRIALTNSVNEALLNPSRVYTFFSSDYVKKVNKATEAAMFLGWVEQLVYDFTDETSEVSTTDKIADITIIIPYIGPALNIGNMLYKDDFVGALIFSGAVILLEFIPEIAIPVLGTFALVSYIANKVLTVQTIDNALSKRNEKWDEVYKYIVTNWLAKVNTQIDLIRKKMKEALENQAEATKAIINYQYNQYTEEEKNNINFNIDDLSSKLNESINKAMININKFLNQCSVSYLMNSMIPYGVKRLEDFDASLKDALLKYIYDNRGTLIGQVDRLKDKVNNTLSTDIPFQLSKYVDNQRLLSTFTEYIKN

SEQ ID NO: 71 - protein, 872 aa, Artificial Sequence
  Synthetic
MPFVNKQFNYRDPVNGVDIAYIKIPNAGQMQPVKAFKIHNKIWVIPERDTFTNPEEGDLNPPPEAKQVPVSYYDSTYLSTDNEKDNYLKGVTKLFERIYSTDLGRMLLTSIVRGIPFWGGSTIDTELKVIDTNCINVIQPDGSYRSEELNLVIIGPSADIIQFECKSFGHEVLNLTRNGYGSTQYIRFSPDFTFGFEESLEVDTNPLLGAGKFATDPAVTLAHELIHAGHRLYGIAINPNRVFKVNTNAYYEMSGLEVSFEELRTFGGHDARFIDSLQENEFRLYYYNRFRDIASTLNRAKSIVGTTASLQYMKNVFKEKYLLSEDTSGKFSVDRLRFDKLYRMLTEIYTEDNFVKFFKVLNRKTYLNFDKAVFRINIVPRVNYTIYDGFNLRNTNLAANFNGQNTEINNMNFTRLKNFTGLFEFYKLLCVRGIITSKTKSLDKGYNKALNDLCIKVNNWDLFFSPSEDNFTNDLNKGEEITSDTNIEAAEENISLDLIQQYYLTFNFDNEPENISIENLSSDIIGQLELMPNIERFPNGKKYELDKYTMFHYLRAQEFEHGKSRIALTNSVNEALLNPSRVYTFFSSDYVKKVNKATEAAMFLGWVEQLVYDFTDETSEVSTTDKIADITIIIPYIGPALNIGNMLYKDDFVGALIFSGAVILLEFIPEIAIPVLGTFALVSYIANKVLTVQTIDNALSKRNEKWDEVYKYIVTNWLAKVNTQIDLIRKKMKEALENQAEATKAIINYQYNQYTEEEKNNINFNIDDLSSKLNESINKAMININKFLNQCSVSYLMNSMIPYGVKRLEDFDASLKDALLKYIYDNRGTLIGQVDRLKDKVNNTLSTDIPFQLSKYVDNQRLLSTFTEYIKN

SEQ ID NO: 72 - protein, 872 aa, Artificial Sequence
  Synthetic
MPFVNKQFNYRDPVNGVDIAYIKIPNAGQMQPVKAFKIHNKIWVIPERDTFTNPEEGDLNPPPEAKQVPVSYYDSTYLSTDNEKDNYLKGVTKLFERIYSTDLGRMLLTSIVRGIPFWGGSTIDTELKVIDTNCINVIQPDGSYRSEELNLVIIGPSADIIQFECKSFGHEVLNLTRNGYGSTQYIRFSPDFTFGFEESLEVDTNPLLGAGKFATDPAVTLAHELIHAGHRLYGIAINPNRVFKVNTNAYYEMSGLEVSFEELRTFGGHDAKFIDSLQENEFRLYYYNRFRDIASTLNRAKSIVGTTASLQYMKNVFREKYLLSEDTSGKFSVDRLRFDKLYRMLTEIYTEDNFVKFFKVLNRKTYLNFDKAVFRINIVPRVNYTIYDGFNLRNTNLAANFNGQNTEINNMNFTRLKNFTGLFEFYKLLCVRGIITSKTKSLDKGYNKALNDLCIKVNNWDLFFSPSEDNFTNDLNKGEEITSDTNIEAAEENISLDLIQQYYLTFNFDNEPENISIENLSSDIIGQLELMPNIERFPNGKKYELDKYTMFHYLRAQEFEHGKSRIALTNSVNEALLNPSRVYTFFSSDYVKKVNKATEAAMFLGWVEQLVYDFTDETSEVSTTDKIADITIIIPYIGPALNIGNMLYKDDFVGALIFSGAVILLEFIPEIAIPVLGTFALVSYIANKVLTVQTIDNALSKRNEKWDEVYKYIVTNWLAKVNTQIDLIRKKMKEALENQAEATKAIINYQYNQYTEEEKNNINFNIDDLSSKLNESINKAMININKFLNQCSVSYLMNSMIPYGVKRLEDFDASLKDALLKYIYDNRGTLIGQVDRLKDKVNNTLSTDIPFQLSKYVDNQRLLSTFTEYIKN

SEQ ID NO: 73 - protein, 872 aa, Artificial Sequence
  Synthetic
MPFVNKQFNYRDPVNGVDIAYIKIPNAGQMQPVKAFKIHNKIWVIPERDTFTNPEEGDLNPPPEAKQVPVSYYDSTYLSTDNEKDNYLKGVTKLFERIYSTDLGRMLLTSIVRGIPFWGGSTIDTELKVIDTNCINVIQPDGSYRSEELNLVIIGPSADIIQFECKSFGHEVLNLTRNGYGSTQYIRFSPDFTFGFEESLEVDTNPLLGAGKFATDPAVTLAHELIHAGHRLYGIAINPNRVFKVNTNAYYEMSGLEVSFEELRTFGGHDAKFIDSLQENEFRLYYYNRFRDIASTLNRAKSIVGTTASLQYMKNVFKEKYLLSEDTSGKFSVDRLRFDRLYRMLTEIYTEDNFVKFFKVLNRKTYLNFDKAVFRINIVPRVNYTIYDGFNLRNTNLAANFNGQNTEINNMNFTRLKNFTGLFEFYKLLCVRGIITSKTKSLDKGYNKALNDLCIKVNNWDLFFSPSEDNFTNDLNKGEEITSDTNIEAAEENISLDLIQQYYLTFNFDNEPENISIENLSSDIIGQLELMPNIERFPNGKKYELDKYTMFHYLRAQEFEHGKSRIALTNSVNEALLNPSRVYTFFSSDYVKKVNKATEAAMFLGWVEQLVYDFTDETSEVSTTDKIADITIIIPYIGPALNIGNMLYKDDFVGALIFSGAVILLEFIPEIAIPVLGTFALVSYIANKVLTVQTIDNALSKRNEKWDEVYKYIVTNWLAKVNTQIDLIRKKMKEALENQAEATKAIINYQYNQYTEEEKNNINFNIDDLSSKLNESINKAMININKFLNQCSVSYLMNSMIPYGVKRLEDFDASLKDALLKYIYDNRGTLIGQVDRLKDKVNNTLSTDIPFQLSKYVDNQRLLSTFTEYIKN

SEQ ID NO: 74 - protein, 872 aa, Artificial Sequence
  Synthetic
MPFVNKQFNYRDPVNGVDIAYIKIPNAGQMQPVKAFKIHNKIWVIPERDTFTNPEEGDLNPPPEAKQVPVSYYDSTYLSTDNEKDNYLKGVTKLFERIYSTDLGRMLLTSIVRGIPFWGGSTIDTELKVIDTNCINVIQPDGSYRSEELNLVIIGPSADIIQFECKSFGHEVLNLTRNGYGSTQYIRFSPDFTFGFEESLEVDTNPLLGAGKFATDPAVTLAHELIHAGHRLYGIAINPNRVFKVNTNAYYEMSGLEVSFEELRTFGGHDAKFIDSLQENEFRLYYYNRFRDIASTLNRAKSIVGTTASLQYMKNVFKEKYLLSEDTSGKFSVDRLRFDKLYRMLTEIYTEDNFVRFFKVLNRKTYLNFDKAVFRINIVPRVNYTIYDGFNLRNTNLAANFNGQNTEINNMNFTRLKNFTGLFEFYKLLCVRGIITSKTKSLDKGYNKALNDLCIKVNNWDLFFSPSEDNFTNDLNKGEEITSDTNIEAAEENISLDLIQQYYLTFNFDNEPENISIENLSSDIIGQLELMPNIERFPNGKKYELDKYTMFHYLRAQEFEHGKSRIALTNSVNEALLNPSRVYTFFSSDYVKKVNKATEAAMFLGWVEQLVYDFTDETSEVSTTDKIADITIIIPYIGPALNIGNMLYKDDFVGALIFSGAVILLEFIPEIAIPVLGTFALVSYIANKVLTVQTIDNALSKRNEKWDEVYKYIVTNWLAKVNTQIDLIRKKMKEALENQAEATKAIINYQYNQYTEEEKNNINFNIDDLSSKLNESINKAMININKFLNQCSVSYLMNSMIPYGVKRLEDFDASLKDALLKYIYDNRGTLIGQVDRLKDKVNNTLSTDIPFQLSKYVDNQRLLSTFTEYIKN

SEQ ID NO: 75 - protein, 872 aa, Artificial Sequence
  Synthetic
MPFVNKQFNYRDPVNGVDIAYIKIPNAGQMQPVKAFKIHNRIWVIPERDTFTNPEEGDLNPPPEAKQVPVSYYDSTYLSTDNEKDNYLKGVTKLFERIYSTDLGRMLLTSIVRGIPFWGGSTIDTELKVIDTNCINVIQPDGSYRSEELNLVIIGPSADIIQFECKSFGHEVLNLTRNGYGSTQYIRFSPDFTFGFEESLEVDTNPLLGAGKFATDPAVTLAHELIHAGHRLYGIAINPNRVFKVNTNAYYEMSGLEVSFEELRTFGGHDAKFIDSLQENEFRLYYYNRFRDIASTLNRAKSIVGTTASLQYMKNVFREKYLLSEDTSGKFSVDRLRFDRLYRMLTEIYTEDNFVKFFKVLNRKTYLNFDKAVFRINIVPRVNYTIYDGFNLRNTNLAANFNGQNTEINNMNFTRLKNFTGLFEFYKLLCVRGIITSKTKSLDKGYNKALNDLCIKVNNWDLFFSPSEDNFTNDLNKGEEITSDTNIEAAEENISLDLIQQYYLTFNFDNEPENISIENLSSDIIGQLELMPNIERFPNGKKYELDKYTMFHYLRAQEFEHGKSRIALTNSVNEALLNPSRVYTFFSSDYVKKVNKATEAAMFLGWVEQLVYDFTDETSEVSTTDKIADITIIIPYIGPALNIGNMLYKDDFVGALIFSGAVILLEFIPEIAIPVLGTFALVSYIANKVLTVQTIDNALSKRNEKWDEVYKYIVTNWLAKVNTQIDLIRKKMKEALENQAEATKAIINYQYNQYTEEEKNNINFNIDDLSSKLNESINKAMININKFLNQCSVSYLMNSMIPYGVKRLEDFDASLKDALLKYIYDNRGTLIGQVDRLKDKVNNTLSTDIPFQLSKYVDNQRLLSTFTEYIKN

SEQ ID NO: 76 - protein, 872 aa, Artificial Sequence
  Synthetic
MPFVNKQFNYRDPVNGVDIAYIKIPNAGQMQPVKAFKIHNRIWVIPERDTFTNPEEGDLNPPPEAKQVPVSYYDSTYLSTDNEKDNYLKGVTKLFERIYSTDLGRMLLTSIVRGIPFWGGSTIDTELKVIDTNCINVIQPDGSYRSEELNLVIIGPSADIIQFECKSFGHEVLNLTRNGYGSTQYIRFSPDFTFGFEESLEVDTNPLLGAGRFATDPAVTLAHELIHAGHRLYGIAINPNRVFKVNTNAYYEMSGLEVSFEELRTFGGHDAKFIDSLQENEFRLYYYNRFRDIASTLNRAKSIVGTTASLQYMKNVFREKYLLSEDTSGKFSVDRLRFDRLYRMLTEIYTEDNFVRFFKVLNRKTYLNFDKAVFRINIVPRVNYTIYDGFNLRNTNLAANFNGQNTEINNMNFTRLKNFTGLFEFYKLLCVRGIITSKTKSLDKGYNKALNDLCIKVNNWDLFFSPSEDNFTNDLNKGEEITSDTNIEAAEENISLDLIQQYYLTFNFDNEPENISIENLSSDIIGQLELMPNIERFPNGKKYELDKYTMFHYLRAQEFEHGKSRIALTNSVNEALLNPSRVYTFFSSDYVKKVNKATEAAMFLGWVEQLVYDFTDETSEVSTTDKIADITIIIPYIGPALNIGNMLYKDDFVGALIFSGAVILLEFIPEIAIPVLGTFALVSYIANKVLTVQTIDNALSKRNEKWDEVYKYIVTNWLAKVNTQIDLIRKKMKEALENQAEATKAIINYQYNQYTEEEKNNINFNIDDLSSKLNESINKAMININKFLNQCSVSYLMNSMIPYGVKRLEDFDASLKDALLKYIYDNRGTLIGQVDRLKDKVNNTLSTDIPFQLSKYVDNQRLLSTFTEYIKN

SEQ ID NO: 77 - protein, 872 aa, Artificial Sequence
  Synthetic
MPFVNKQFNYRDPVNGVDIAYIKIPNAGQMQPVKAFKIHNRIWVIPERDTFTNPEEGDLNPPPEAKQVPVSYYDSTYLSTDNEKDNYLKGVTKLFERIYSTDLGRMLLTSIVRGIPFWGGSTIDTELKVIDTNCINVIQPDGSYRSEELNLVIIGPSADIIQFECKSFGHEVLNLTRNGYGSTQYIRFSPDFTFGFEESLEVDTNPLLGAGRFATDPAVTLAHELIHAGHRLYGIAINPNRVFKVNTNAYYEMSGLEVSFEELRTFGGHDARFIDSLQENEFRLYYYNRFRDIASTLNRAKSIVGTTASLQYMKNVFREKYLLSEDTSGKFSVDRLRFDRLYRMLTEIYTEDNFVRFFKVLNRKTYLNFDKAVFRINIVPRVNYTIYDGFNLRNTNLAANFNGQNTEINNMNFTRLKNFTGLFEFYKLLCVRGIITSKTKSLDKGYNKALNDLCIKVNNWDLFFSPSEDNFTNDLNKGEEITSDTNIEAAEENISLDLIQQYYLTFNFDNEPENISIENLSSDIIGQLELMPNIERFPNGKKYELDKYTMFHYLRAQEFEHGKSRIALTNSVNEALLNPSRVYTFFSSDYVKKVNKATEAAMFLGWVEQLVYDFTDETSEVSTTDKIADITIIIPYIGPALNIGNMLYKDDFVGALIFSGAVILLEFIPEIAIPVLGTFALVSYIANKVLTVQTIDNALSKRNEKWDEVYKYIVTNWLAKVNTQIDLIRKKMKEALENQAEATKAIINYQYNQYTEEEKNNINFNIDDLSSKLNESINKAMININKFLNQCSVSYLMNSMIPYGVKRLEDFDASLKDALLKYIYDNRGTLIGQVDRLKDKVNNTLSTDIPFQLSKYVDNQRLLSTFTEYIKN

SEQ ID NO: 78 - protein, 872 aa, Clostridium botulinum
MPFVNKQFNYKDPVNGVDIAYIKIPNAGQMQPVKAFKIHNKIWVIPERDTFTNPEEGDLNPPPEAKQVPVSYYDSTYLSTDNEKDNYLKGVTKLFERIYSTDLGRMLLTSIVRGIPFWGGSTIDTELKVIDTNCINVIQPDGSYRSEELNLVIIGPSADIIQFECKSFGHDVLNLTRNGYGSTQYIRFSPDFTFGFEESLEVDTNPLLGAGKFATDPAVTLAHELIHAEHRLYGIAINPNRVFKVNTNAYYEMSGLEVSFEELRTFGGHDAKFIDSLQENEFRLYYYNKFKDVASTLNKAKSIIGTTASLQYMKNVFKEKYLLSEDTSGKFSVDKLKFDKLYKMLTEIYTEDNFVNFFKVINRKTYLNFDKAVFRINIVPDENYTIKDGFNLKGANLSTNFNGQNTEINSRNFTRLKNFTGLFEFYKLLCVRGIIPFKTKSLDEGYNKALNDLCIKVNNWDLFFSPSEDNFTNDLDKVEEITADTNIEAAEENISLDLIQQYYLTFDFDNEPENISIENLSSDIIGQLEPMPNIERFPNGKKYELDKYTMFHYLRAQEFEHGDSRIILTNSAEEALLKPNVAYTFFSSKYVKKINKAVEAFMFLNWAEELVYDFTDETNEVTTMDKIADITIIVPYIGPALNIGNMLSKGEFVEAIIFTGVVAMLEFIPEYALPVFGTFAIVSYIANKVLTVQTINNALSKRNEKWDEVYKYTVTNWLAKVNTQIDLIREKMKKALENQAEATKAIINYQYNQYTEEEKNNINFNIDDLSSKLNESINSAMININKFLDQCSVSYLMNSMIPYAVKRLKDFDASVRDVLLKYIYDNRGTLVLQVDRLKDEVNNTLSADIPFQLSKYVDNKKLLSTFTEYIKN

SEQ ID NO: 79 - protein, 872 aa, Artificial Sequence
  Synthetic
MPFVNKQFNYRDPVNGVDIAYIKIPNAGQMQPVKAFKIHNKIWVIPERDTFTNPEEGDLNPPPEAKQVPVSYYDSTYLSTDNEKDNYLKGVTKLFERIYSTDLGRMLLTSIVRGIPFWGGSTIDTELKVIDTNCINVIQPDGSYRSEELNLVIIGPSADIIQFECKSFGHDVLNLTRNGYGSTQYIRFSPDFTFGFEESLEVDTNPLLGAGKFATDPAVTLAHELIHAEHRLYGIAINPNRVFKVNTNAYYEMSGLEVSFEELRTFGGHDAKFIDSLQENEFRLYYYNKFKDVASTLNKAKSIIGTTASLQYMKNVFKEKYLLSEDTSGKFSVDKLKFDKLYKMLTEIYTEDNFVNFFKVINRKTYLNFDKAVFRINIVPDENYTIKDGFNLKGANLSTNFNGQNTEINSRNFTRLKNFTGLFEFYKLLCVRGIIPFKTKSLDEGYNKALNDLCIKVNNWDLFFSPSEDNFTNDLDKVEEITADTNIEAAEENISLDLIQQYYLTFDFDNEPENISIENLSSDIIGQLEPMPNIERFPNGKKYELDKYTMFHYLRAQEFEHGDSRIILTNSAEEALLKPNVAYTFFSSKYVKKINKAVEAFMFLNWAEELVYDFTDETNEVTTMDKIADITIIVPYIGPALNIGNMLSKGEFVEAIIFTGVVAMLEFIPEYALPVFGTFAIVSYIANKVLTVQTINNALSKRNEKWDEVYKYTVTNWLAKVNTQIDLIREKMKKALENQAEATKAIINYQYNQYTEEEKNNINFNIDDLSSKLNESINSAMININKFLDQCSVSYLMNSMIPYAVKRLKDFDASVRDVLLKYIYDNRGTLVLQVDRLKDEVNNTLSADIPFQLSKYVDNKKLLSTFTEYIKN

SEQ ID NO: 80 - protein, 872 aa, Artificial Sequence
  Synthetic
MPFVNKQFNYKDPVNGVDIAYIKIPNAGQMQPVKAFKIHNKIWVIPERDTFTNPEEGDLNPPPEAKQVPVSYYDSTYLSTDNEKDNYLKGVTKLFERIYSTDLGRMLLTSIVRGIPFWGGSTIDTELKVIDTNCINVIQPDGSYRSEELNLVIIGPSADIIQFECKSFGHDVLNLTRNGYGSTQYIRFSPDFTFGFEESLEVDTNPLLGAGKFATDPAVTLAHELIHAEHRLYGIAINPNRVFKVNTNAYYEMSGLEVSFEELRTFGGHDAKFIDSLQENEFRLYYYNRFKDVASTLNKAKSIIGTTASLQYMKNVFKEKYLLSEDTSGKFSVDKLKFDKLYKMLTEIYTEDNFVNFFKVINRKTYLNFDKAVFRINIVPDENYTIKDGFNLKGANLSTNFNGQNTEINSRNFTRLKNFTGLFEFYKLLCVRGIIPFKTKSLDEGYNKALNDLCIKVNNWDLFFSPSEDNFTNDLDKVEEITADTNIEAAEENISLDLIQQYYLTFDFDNEPENISIENLSSDIIGQLEPMPNIERFPNGKKYELDKYTMFHYLRAQEFEHGDSRIILTNSAEEALLKPNVAYTFFSSKYVKKINKAVEAFMFLNWAEELVYDFTDETNEVTTMDKIADITIIVPYIGPALNIGNMLSKGEFVEAIIFTGVVAMLEFIPEYALPVFGTFAIVSYIANKVLTVQTINNALSKRNEKWDEVYKYTVTNWLAKVNTQIDLIREKMKKALENQAEATKAIINYQYNQYTEEEKNNINFNIDDLSSKLNESINSAMININKFLDQCSVSYLMNSMIPYAVKRLKDFDASVRDVLLKYIYDNRGTLVLQVDRLKDEVNNTLSADIPFQLSKYVDNKKLLSTFTEYIKN

SEQ ID NO: 81 - protein, 872 aa, Artificial Sequence
  Synthetic
MPFVNKQFNYKDPVNGVDIAYIKIPNAGQMQPVKAFKIHNKIWVIPERDTFTNPEEGDLNPPPEAKQVPVSYYDSTYLSTDNEKDNYLKGVTKLFERIYSTDLGRMLLTSIVRGIPFWGGSTIDTELKVIDTNCINVIQPDGSYRSEELNLVIIGPSADIIQFECKSFGHDVLNLTRNGYGSTQYIRFSPDFTFGFEESLEVDTNPLLGAGKFATDPAVTLAHELIHAEHRLYGIAINPNRVFKVNTNAYYEMSGLEVSFEELRTFGGHDAKFIDSLQENEFRLYYYNKFRDVASTLNKAKSIIGTTASLQYMKNVFKEKYLLSEDTSGKFSVDKLKFDKLYKMLTEIYTEDNFVNFFKVINRKTYLNFDKAVFRINIVPDENYTIKDGFNLKGANLSTNFNGQNTEINSRNFTRLKNFTGLFEFYKLLCVRGIIPFKTKSLDEGYNKALNDLCIKVNNWDLFFSPSEDNFTNDLDKVEEITADTNIEAAEENISLDLIQQYYLTFDFDNEPENISIENLSSDIIGQLEPMPNIERFPNGKKYELDKYTMFHYLRAQEFEHGDSRIILTNSAEEALLKPNVAYTFFSSKYVKKINKAVEAFMFLNWAEELVYDFTDETNEVTTMDKIADITIIVPYIGPALNIGNMLSKGEFVEAIIFTGVVAMLEFIPEYALPVFGTFAIVSYIANKVLTVQTINNALSKRNEKWDEVYKYTVTNWLAKVNTQIDLIREKMKKALENQAEATKAIINYQYNQYTEEEKNNINFNIDDLSSKLNESINSAMININKFLDQCSVSYLMNSMIPYAVKRLKDFDASVRDVLLKYIYDNRGTLVLQVDRLKDEVNNTLSADIPFQLSKYVDNKKLLSTFTEYIKN

SEQ ID NO: 82 - protein, 872 aa, Artificial Sequence
  Synthetic
MPFVNKQFNYKDPVNGVDIAYIKIPNAGQMQPVKAFKIHNKIWVIPERDTFTNPEEGDLNPPPEAKQVPVSYYDSTYLSTDNEKDNYLKGVTKLFERIYSTDLGRMLLTSIVRGIPFWGGSTIDTELKVIDTNCINVIQPDGSYRSEELNLVIIGPSADIIQFECKSFGHDVLNLTRNGYGSTQYIRFSPDFTFGFEESLEVDTNPLLGAGKFATDPAVTLAHELIHAEHRLYGIAINPNRVFKVNTNAYYEMSGLEVSFEELRTFGGHDAKFIDSLQENEFRLYYYNKFKDVASTLNRAKSIIGTTASLQYMKNVFKEKYLLSEDTSGKFSVDKLKFDKLYKMLTEIYTEDNFVNFFKVINRKTYLNFDKAVFRINIVPDENYTIKDGFNLKGANLSTNFNGQNTEINSRNFTRLKNFTGLFEFYKLLCVRGIIPFKTKSLDEGYNKALNDLCIKVNNWDLFFSPSEDNFTNDLDKVEEITADTNIEAAEENISLDLIQQYYLTFDFDNEPENISIENLSSDIIGQLEPMPNIERFPNGKKYELDKYTMFHYLRAQEFEHGDSRIILTNSAEEALLKPNVAYTFFSSKYVKKINKAVEAFMFLNWAEELVYDFTDETNEVTTMDKIADITIIVPYIGPALNIGNMLSKGEFVEAIIFTGVVAMLEFIPEYALPVFGTFAIVSYIANKVLTVQTINNALSKRNEKWDEVYKYTVTNWLAKVNTQIDLIREKMKKALENQAEATKAIINYQYNQYTEEEKNNINFNIDDLSSKLNESINSAMININKFLDQCSVSYLMNSMIPYAVKRLKDFDASVRDVLLKYIYDNRGTLVLQVDRLKDEVNNTLSADIPFQLSKYVDNKKLLSTFTEYIKN

SEQ ID NO: 83 - protein, 872 aa, Artificial Sequence
  Synthetic
MPFVNKQFNYKDPVNGVDIAYIKIPNAGQMQPVKAFKIHNKIWVIPERDTFTNPEEGDLNPPPEAKQVPVSYYDSTYLSTDNEKDNYLKGVTKLFERIYSTDLGRMLLTSIVRGIPFWGGSTIDTELKVIDTNCINVIQPDGSYRSEELNLVIIGPSADIIQFECKSFGHDVLNLTRNGYGSTQYIRFSPDFTFGFEESLEVDTNPLLGAGKFATDPAVTLAHELIHAEHRLYGIAINPNRVFKVNTNAYYEMSGLEVSFEELRTFGGHDAKFIDSLQENEFRLYYYNKFKDVASTLNKAKSIIGTTASLQYMKNVFKEKYLLSEDTSGKFSVDRLKFDKLYKMLTEIYTEDNFVNFFKVINRKTYLNFDKAVFRINIVPDENYTIKDGFNLKGANLSTNFNGQNTEINSRNFTRLKNFTGLFEFYKLLCVRGIIPFKTKSLDEGYNKALNDLCIKVNNWDLFFSPSEDNFTNDLDKVEEITADTNIEAAEENISLDLIQQYYLTFDFDNEPENISIENLSSDIIGQLEPMPNIERFPNGKKYELDKYTMFHYLRAQEFEHGDSRIILTNSAEEALLKPNVAYTFFSSKYVKKINKAVEAFMFLNWAEELVYDFTDETNEVTTMDKIADITIIVPYIGPALNIGNMLSKGEFVEAIIFTGVVAMLEFIPEYALPVFGTFAIVSYIANKVLTVQTINNALSKRNEKWDEVYKYTVTNWLAKVNTQIDLIREKMKKALENQAEATKAIINYQYNQYTEEEKNNINFNIDDLSSKLNESINSAMININKFLDQCSVSYLMNSMIPYAVKRLKDFDASVRDVLLKYIYDNRGTLVLQVDRLKDEVNNTLSADIPFQLSKYVDNKKLLSTFTEYIKN

SEQ ID NO: 84 - protein, 872 aa, Artificial Sequence
  Synthetic
MPFVNKQFNYKDPVNGVDIAYIKIPNAGQMQPVKAFKIHNKIWVIPERDTFTNPEEGDLNPPPEAKQVPVSYYDSTYLSTDNEKDNYLKGVTKLFERIYSTDLGRMLLTSIVRGIPFWGGSTIDTELKVIDTNCINVIQPDGSYRSEELNLVIIGPSADIIQFECKSFGHDVLNLTRNGYGSTQYIRFSPDFTFGFEESLEVDTNPLLGAGKFATDPAVTLAHELIHAEHRLYGIAINPNRVFKVNTNAYYEMSGLEVSFEELRTFGGHDAKFIDSLQENEFRLYYYNKFKDVASTLNKAKSIIGTTASLQYMKNVFKEKYLLSEDTSGKFSVDKLRFDKLYKMLTEIYTEDNFVNFFKVINRKTYLNFDKAVFRINIVPDENYTIKDGFNLKGANLSTNFNGQNTEINSRNFTRLKNFTGLFEFYKLLCVRGIIPFKTKSLDEGYNKALNDLCIKVNNWDLFFSPSEDNFTNDLDKVEEITADTNIEAAEENISLDLIQQYYLTFDFDNEPENISIENLSSDIIGQLEPMPNIERFPNGKKYELDKYTMFHYLRAQEFEHGDSRIILTNSAEEALLKPNVAYTFFSSKYVKKINKAVEAFMFLNWAEELVYDFTDETNEVTTMDKIADITIIVPYIGPALNIGNMLSKGEFVEAIIFTGVVAMLEFIPEYALPVFGTFAIVSYIANKVLTVQTINNALSKRNEKWDEVYKYTVTNWLAKVNTQIDLIREKMKKALENQAEATKAIINYQYNQYTEEEKNNINFNIDDLSSKLNESINSAMININKFLDQCSVSYLMNSMIPYAVKRLKDFDASVRDVLLKYIYDNRGTLVLQVDRLKDEVNNTLSADIPFQLSKYVDNKKLLSTFTEYIKN

SEQ ID NO: 85 - protein, 872 aa, Artificial Sequence
  Synthetic
MPFVNKQFNYKDPVNGVDIAYIKIPNAGQMQPVKAFKIHNKIWVIPERDTFTNPEEGDLNPPPEAKQVPVSYYDSTYLSTDNEKDNYLKGVTKLFERIYSTDLGRMLLTSIVRGIPFWGGSTIDTELKVIDTNCINVIQPDGSYRSEELNLVIIGPSADIIQFECKSFGHDVLNLTRNGYGSTQYIRFSPDFTFGFEESLEVDTNPLLGAGKFATDPAVTLAHELIHAEHRLYGIAINPNRVFKVNTNAYYEMSGLEVSFEELRTFGGHDAKFIDSLQENEFRLYYYNKFKDVASTLNKAKSIIGTTASLQYMKNVFKEKYLLSEDTSGKFSVDKLKFDKLYRMLTEIYTEDNFVNFFKVINRKTYLNFDKAVFRINIVPDENYTIKDGFNLKGANLSTNFNGQNTEINSRNFTRLKNFTGLFEFYKLLCVRGIIPFKTKSLDEGYNKALNDLCIKVNNWDLFFSPSEDNFTNDLDKVEEITADTNIEAAEENISLDLIQQYYLTFDFDNEPENISIENLSSDIIGQLEPMPNIERFPNGKKYELDKYTMFHYLRAQEFEHGDSRIILTNSAEEALLKPNVAYTFFSSKYVKKINKAVEAFMFLNWAEELVYDFTDETNEVTTMDKIADITIIVPYIGPALNIGNMLSKGEFVEAIIFTGVVAMLEFIPEYALPVFGTFAIVSYIANKVLTVQTINNALSKRNEKWDEVYKYTVTNWLAKVNTQIDLIREKMKKALENQAEATKAIINYQYNQYTEEEKNNINFNIDDLSSKLNESINSAMININKFLDQCSVSYLMNSMIPYAVKRLKDFDASVRDVLLKYIYDNRGTLVLQVDRLKDEVNNTLSADIPFQLSKYVDNKKLLSTFTEYIKN

SEQ ID NO: 86 - protein, 872 aa, Artificial Sequence
  Synthetic
MPFVNKQFNYRDPVNGVDIAYIKIPNAGQMQPVKAFKIHNKIWVIPERDTFTNPEEGDLNPPPEAKQVPVSYYDSTYLSTDNEKDNYLKGVTKLFERIYSTDLGRMLLTSIVRGIPFWGGSTIDTELKVIDTNCINVIQPDGSYRSEELNLVIIGPSADIIQFECKSFGHDVLNLTRNGYGSTQYIRFSPDFTFGFEESLEVDTNPLLGAGKFATDPAVTLAHELIHAEHRLYGIAINPNRVFKVNTNAYYEMSGLEVSFEELRTFGGHDAKFIDSLQENEFRLYYYNRFRDVASTLNRAKSIIGTTASLQYMKNVFKEKYLLSEDTSGKFSVDRLRFDKLYRMLTEIYTEDNFVNFFKVINRKTYLNFDKAVFRINIVPDENYTIKDGFNLKGANLSTNFNGQNTEINSRNFTRLKNFTGLFEFYKLLCVRGIIPFKTKSLDEGYNKALNDLCIKVNNWDLFFSPSEDNFTNDLDKVEEITADTNIEAAEENISLDLIQQYYLTFDFDNEPENISIENLSSDIIGQLEPMPNIERFPNGKKYELDKYTMFHYLRAQEFEHGDSRIILTNSAEEALLKPNVAYTFFSSKYVKKINKAVEAFMFLNWAEELVYDFTDETNEVTTMDKIADITIIVPYIGPALNIGNMLSKGEFVEAIIFTGVVAMLEFIPEYALPVFGTFAIVSYIANKVLTVQTINNALSKRNEKWDEVYKYTVTNWLAKVNTQIDLIREKMKKALENQAEATKAIINYQYNQYTEEEKNNINFNIDDLSSKLNESINSAMININKFLDQCSVSYLMNSMIPYAVKRLKDFDASVRDVLLKYIYDNRGTLVLQVDRLKDEVNNTLSADIPFQLSKYVDNKKLLSTFTEYIKN

SEQ ID NO: 87 - protein, 441 aa, Clostridium botulinum
MPFVNKQFNYKDPVNGVDIAYIKIPNAGQMQPVKAFKIHNKIWVIPERDTFTNPEEGDLNPPPEAKQVPVSYYDSTYLSTDNEKDNYLKGVTKLFERIYSTDLGRMLLTSIVRGIPFWGGSTIDTELKVIDTNCINVIQPDGSYRSEELNLVIIGPSADIIQFECKSFGHEVLNLTRNGYGSTQYIRFSPDFTFGFEESLEVDTNPLLGAGKFATDPAVTLAHELIHAGHRLYGIAINPNRVFKVNTNAYYEMSGLEVSFEELRTFGGHDAKFIDSLQENEFRLYYYNKFKDIASTLNKAKSIVGTTASLQYMKNVFKEKYLLSEDTSGKFSVDKLKFDKLYKMLTEIYTEDNFVKFFKVLNRKTYLNFDKAVFKINIVPKVNYTIYDGFNLRNTNLAANFNGQNTEINNMNFTKLKNFTGLFEFYKLLCVRGIITSKTKS

SEQ ID NO: 88 - protein, 441 aa, Artificial Sequence
  Synthetic
MPFVNKQFNYRDPVNGVDIAYIKIPNAGQMQPVKAFKIHNKIWVIPERDTFTNPEEGDLNPPPEAKQVPVSYYDSTYLSTDNEKDNYLKGVTKLFERIYSTDLGRMLLTSIVRGIPFWGGSTIDTELKVIDTNCINVIQPDGSYRSEELNLVIIGPSADIIQFECKSFGHEVLNLTRNGYGSTQYIRFSPDFTFGFEESLEVDTNPLLGAGKFATDPAVTLAHELIHAGHRLYGIAINPNRVFKVNTNAYYEMSGLEVSFEELRTFGGHDAKFIDSLQENEFRLYYYNKFKDIASTLNKAKSIVGTTASLQYMKNVFKEKYLLSEDTSGKFSVDKLKFDKLYKMLTEIYTEDNFVKFFKVLNRKTYLNFDKAVFKINIVPKVNYTIYDGFNLRNTNLAANFNGQNTEINNMNFTKLKNFTGLFEFYKLLCVRGIITSKTKS

SEQ ID NO: 89 - protein, 441 aa, Artificial Sequence
  Synthetic
MPFVNKQFNYKDPVNGVDIAYIKIPNAGQMQPVKAFKIHNRIWVIPERDTFTNPEEGDLNPPPEAKQVPVSYYDSTYLSTDNEKDNYLKGVTKLFERIYSTDLGRMLLTSIVRGIPFWGGSTIDTELKVIDTNCINVIQPDGSYRSEELNLVIIGPSADIIQFECKSFGHEVLNLTRNGYGSTQYIRFSPDFTFGFEESLEVDTNPLLGAGKFATDPAVTLAHELIHAGHRLYGIAINPNRVFKVNTNAYYEMSGLEVSFEELRTFGGHDAKFIDSLQENEFRLYYYNKFKDIASTLNKAKSIVGTTASLQYMKNVFKEKYLLSEDTSGKFSVDKLKFDKLYKMLTEIYTEDNFVKFFKVLNRKTYLNFDKAVFKINIVPKVNYTIYDGFNLRNTNLAANFNGQNTEINNMNFTKLKNFTGLFEFYKLLCVRGIITSKTKS

SEQ ID NO: 90 - protein, 441 aa, Artificial Sequence
  Synthetic
MPFVNKQFNYKDPVNGVDIAYIKIPNAGQMQPVKAFKIHNKIWVIPERDTFTNPEEGDLNPPPEAKQVPVSYYDSTYLSTDNEKDNYLKGVTKLFERIYSTDLGRMLLTSIVRGIPFWGGSTIDTELKVIDTNCINVIQPDGSYRSEELNLVIIGPSADIIQFECKSFGHEVLNLTRNGYGSTQYIRFSPDFTFGFEESLEVDTNPLLGAGRFATDPAVTLAHELIHAGHRLYGIAINPNRVFKVNTNAYYEMSGLEVSFEELRTFGGHDAKFIDSLQENEFRLYYYNKFKDIASTLNKAKSIVGTTASLQYMKNVFKEKYLLSEDTSGKFSVDKLKFDKLYKMLTEIYTEDNFVKFFKVLNRKTYLNFDKAVFKINIVPKVNYTIYDGFNLRNTNLAANFNGQNTEINNMNFTKLKNFTGLFEFYKLLCVRGIITSKTKS

SEQ ID NO: 91 - protein, 441 aa, Artificial Sequence
  Synthetic
MPFVNKQFNYKDPVNGVDIAYIKIPNAGQMQPVKAFKIHNKIWVIPERDTFTNPEEGDLNPPPEAKQVPVSYYDSTYLSTDNEKDNYLKGVTKLFERIYSTDLGRMLLTSIVRGIPFWGGSTIDTELKVIDTNCINVIQPDGSYRSEELNLVIIGPSADIIQFECKSFGHEVLNLTRNGYGSTQYIRFSPDFTFGFEESLEVDTNPLLGAGKFATDPAVTLAHELIHAGHRLYGIAINPNRVFKVNTNAYYEMSGLEVSFEELRTFGGHDARFIDSLQENEFRLYYYNKFKDIASTLNKAKSIVGTTASLQYMKNVFKEKYLLSEDTSGKFSVDKLKFDKLYKMLTEIYTEDNFVKFFKVLNRKTYLNFDKAVFKINIVPKVNYTIYDGFNLRNTNLAANFNGQNTEINNMNFTKLKNFTGLFEFYKLLCVRGIITSKTKS

SEQ ID NO: 92 - protein, 441 aa, Artificial Sequence
  Synthetic
MPFVNKQFNYKDPVNGVDIAYIKIPNAGQMQPVKAFKIHNKIWVIPERDTFTNPEEGDLNPPPEAKQVPVSYYDSTYLSTDNEKDNYLKGVTKLFERIYSTDLGRMLLTSIVRGIPFWGGSTIDTELKVIDTNCINVIQPDGSYRSEELNLVIIGPSADIIQFECKSFGHEVLNLTRNGYGSTQYIRFSPDFTFGFEESLEVDTNPLLGAGKFATDPAVTLAHELIHAGHRLYGIAINPNRVFKVNTNAYYEMSGLEVSFEELRTFGGHDAKFIDSLQENEFRLYYYNRFKDIASTLNKAKSIVGTTASLQYMKNVFKEKYLLSEDTSGKFSVDKLKFDKLYKMLTEIYTEDNFVKFFKVLNRKTYLNFDKAVFKINIVPKVNYTIYDGFNLRNTNLAANFNGQNTEINNMNFTKLKNFTGLFEFYKLLCVRGIITSKTKS

SEQ ID NO: 93 - protein, 441 aa, Artificial Sequence
  Synthetic
MPFVNKQFNYKDPVNGVDIAYIKIPNAGQMQPVKAFKIHNKIWVIPERDTFTNPEEGDLNPPPEAKQVPVSYYDSTYLSTDNEKDNYLKGVTKLFERIYSTDLGRMLLTSIVRGIPFWGGSTIDTELKVIDTNCINVIQPDGSYRSEELNLVIIGPSADIIQFECKSFGHEVLNLTRNGYGSTQYIRFSPDFTFGFEESLEVDTNPLLGAGKFATDPAVTLAHELIHAGHRLYGIAINPNRVFKVNTNAYYEMSGLEVSFEELRTFGGHDAKFIDSLQENEFRLYYYNKFRDIASTLNKAKSIVGTTASLQYMKNVFKEKYLLSEDTSGKFSVDKLKFDKLYKMLTEIYTEDNFVKFFKVLNRKTYLNFDKAVFKINIVPKVNYTIYDGFNLRNTNLAANFNGQNTEINNMNFTKLKNFTGLFEFYKLLCVRGIITSKTKS

SEQ ID NO: 94 - protein, 441 aa, Artificial Sequence
  Synthetic
MPFVNKQFNYKDPVNGVDIAYIKIPNAGQMQPVKAFKIHNKIWVIPERDTFTNPEEGDLNPPPEAKQVPVSYYDSTYLSTDNEKDNYLKGVTKLFERIYSTDLGRMLLTSIVRGIPFWGGSTIDTELKVIDTNCINVIQPDGSYRSEELNLVIIGPSADIIQFECKSFGHEVLNLTRNGYGSTQYIRFSPDFTFGFEESLEVDTNPLLGAGKFATDPAVTLAHELIHAGHRLYGIAINPNRVFKVNTNAYYEMSGLEVSFEELRTFGGHDAKFIDSLQENEFRLYYYNKFKDIASTLNRAKSIVGTTASLQYMKNVFKEKYLLSEDTSGKFSVDKLKFDKLYKMLTEIYTEDNFVKFFKVLNRKTYLNFDKAVFKINIVPKVNYTIYDGFNLRNTNLAANFNGQNTEINNMNFTKLKNFTGLFEFYKLLCVRGIITSKTKS

SEQ ID NO: 95 - protein, 441 aa, Artificial Sequence
  Synthetic
MPFVNKQFNYKDPVNGVDIAYIKIPNAGQMQPVKAFKIHNKIWVIPERDTFTNPEEGDLNPPPEAKQVPVSYYDSTYLSTDNEKDNYLKGVTKLFERIYSTDLGRMLLTSIVRGIPFWGGSTIDTELKVIDTNCINVIQPDGSYRSEELNLVIIGPSADIIQFECKSFGHEVLNLTRNGYGSTQYIRFSPDFTFGFEESLEVDTNPLLGAGKFATDPAVTLAHELIHAGHRLYGIAINPNRVFKVNTNAYYEMSGLEVSFEELRTFGGHDAKFIDSLQENEFRLYYYNKFKDIASTLNKAKSIVGTTASLQYMKNVFREKYLLSEDTSGKFSVDKLKFDKLYKMLTEIYTEDNFVKFFKVLNRKTYLNFDKAVFKINIVPKVNYTIYDGFNLRNTNLAANFNGQNTEINNMNFTKLKNFTGLFEFYKLLCVRGIITSKTKS

SEQ ID NO: 96 - protein, 441 aa, Artificial Sequence
  Synthetic
MPFVNKQFNYKDPVNGVDIAYIKIPNAGQMQPVKAFKIHNKIWVIPERDTFTNPEEGDLNPPPEAKQVPVSYYDSTYLSTDNEKDNYLKGVTKLFERIYSTDLGRMLLTSIVRGIPFWGGSTIDTELKVIDTNCINVIQPDGSYRSEELNLVIIGPSADIIQFECKSFGHEVLNLTRNGYGSTQYIRFSPDFTFGFEESLEVDTNPLLGAGKFATDPAVTLAHELIHAGHRLYGIAINPNRVFKVNTNAYYEMSGLEVSFEELRTFGGHDAKFIDSLQENEFRLYYYNKFKDIASTLNKAKSIVGTTASLQYMKNVFKEKYLLSEDTSGKFSVDRLKFDKLYKMLTEIYTEDNFVKFFKVLNRKTYLNFDKAVFKINIVPKVNYTIYDGFNLRNTNLAANFNGQNTEINNMNFTKLKNFTGLFEFYKLLCVRGIITSKTKS

SEQ ID NO: 97 - protein, 441 aa, Artificial Sequence
  Synthetic
MPFVNKQFNYKDPVNGVDIAYIKIPNAGQMQPVKAFKIHNKIWVIPERDTFTNPEEGDLNPPPEAKQVPVSYYDSTYLSTDNEKDNYLKGVTKLFERIYSTDLGRMLLTSIVRGIPFWGGSTIDTELKVIDTNCINVIQPDGSYRSEELNLVIIGPSADIIQFECKSFGHEVLNLTRNGYGSTQYIRFSPDFTFGFEESLEVDTNPLLGAGKFATDPAVTLAHELIHAGHRLYGIAINPNRVFKVNTNAYYEMSGLEVSFEELRTFGGHDAKFIDSLQENEFRLYYYNKFKDIASTLNKAKSIVGTTASLQYMKNVFKEKYLLSEDTSGKFSVDKLRFDKLYKMLTEIYTEDNFVKFFKVLNRKTYLNFDKAVFKINIVPKVNYTIYDGFNLRNTNLAANFNGQNTEINNMNFTKLKNFTGLFEFYKLLCVRGIITSKTKS

SEQ ID NO: 98 - protein, 441 aa, Artificial Sequence
  Synthetic
MPFVNKQFNYKDPVNGVDIAYIKIPNAGQMQPVKAFKIHNKIWVIPERDTFTNPEEGDLNPPPEAKQVPVSYYDSTYLSTDNEKDNYLKGVTKLFERIYSTDLGRMLLTSIVRGIPFWGGSTIDTELKVIDTNCINVIQPDGSYRSEELNLVIIGPSADIIQFECKSFGHEVLNLTRNGYGSTQYIRFSPDFTFGFEESLEVDTNPLLGAGKFATDPAVTLAHELIHAGHRLYGIAINPNRVFKVNTNAYYEMSGLEVSFEELRTFGGHDAKFIDSLQENEFRLYYYNKFKDIASTLNKAKSIVGTTASLQYMKNVFKEKYLLSEDTSGKFSVDKLKFDRLYKMLTEIYTEDNFVKFFKVLNRKTYLNFDKAVFKINIVPKVNYTIYDGFNLRNTNLAANFNGQNTEINNMNFTKLKNFTGLFEFYKLLCVRGIITSKTKS

SEQ ID NO: 99 - protein, 441 aa, Artificial Sequence
  Synthetic
MPFVNKQFNYKDPVNGVDIAYIKIPNAGQMQPVKAFKIHNKIWVIPERDTFTNPEEGDLNPPPEAKQVPVSYYDSTYLSTDNEKDNYLKGVTKLFERIYSTDLGRMLLTSIVRGIPFWGGSTIDTELKVIDTNCINVIQPDGSYRSEELNLVIIGPSADIIQFECKSFGHEVLNLTRNGYGSTQYIRFSPDFTFGFEESLEVDTNPLLGAGKFATDPAVTLAHELIHAGHRLYGIAINPNRVFKVNTNAYYEMSGLEVSFEELRTFGGHDAKFIDSLQENEFRLYYYNKFKDIASTLNKAKSIVGTTASLQYMKNVFKEKYLLSEDTSGKFSVDKLKFDKLYRMLTEIYTEDNFVKFFKVLNRKTYLNFDKAVFKINIVPKVNYTIYDGFNLRNTNLAANFNGQNTEINNMNFTKLKNFTGLFEFYKLLCVRGIITSKTKS

SEQ ID NO: 100 - protein, 441 aa, Artificial Sequence
  Synthetic
MPFVNKQFNYKDPVNGVDIAYIKIPNAGQMQPVKAFKIHNKIWVIPERDTFTNPEEGDLNPPPEAKQVPVSYYDSTYLSTDNEKDNYLKGVTKLFERIYSTDLGRMLLTSIVRGIPFWGGSTIDTELKVIDTNCINVIQPDGSYRSEELNLVIIGPSADIIQFECKSFGHEVLNLTRNGYGSTQYIRFSPDFTFGFEESLEVDTNPLLGAGKFATDPAVTLAHELIHAGHRLYGIAINPNRVFKVNTNAYYEMSGLEVSFEELRTFGGHDAKFIDSLQENEFRLYYYNKFKDIASTLNKAKSIVGTTASLQYMKNVFKEKYLLSEDTSGKFSVDKLKFDKLYKMLTEIYTEDNFVRFFKVLNRKTYLNFDKAVFKINIVPKVNYTIYDGFNLRNTNLAANFNGQNTEINNMNFTKLKNFTGLFEFYKLLCVRGIITSKTKS

SEQ ID NO: 101 - protein, 441 aa, Artificial Sequence
  Synthetic
MPFVNKQFNYKDPVNGVDIAYIKIPNAGQMQPVKAFKIHNKIWVIPERDTFTNPEEGDLNPPPEAKQVPVSYYDSTYLSTDNEKDNYLKGVTKLFERIYSTDLGRMLLTSIVRGIPFWGGSTIDTELKVIDTNCINVIQPDGSYRSEELNLVIIGPSADIIQFECKSFGHEVLNLTRNGYGSTQYIRFSPDFTFGFEESLEVDTNPLLGAGKFATDPAVTLAHELIHAGHRLYGIAINPNRVFKVNTNAYYEMSGLEVSFEELRTFGGHDAKFIDSLQENEFRLYYYNKFKDIASTLNKAKSIVGTTASLQYMKNVFKEKYLLSEDTSGKFSVDKLKFDKLYKMLTEIYTEDNFVKFFKVLNRKTYLNFDKAVFRINIVPKVNYTIYDGFNLRNTNLAANFNGQNTEINNMNFTKLKNFTGLFEFYKLLCVRGIITSKTKS

SEQ ID NO: 102 - protein, 441 aa, Artificial Sequence
  Synthetic
MPFVNKQFNYKDPVNGVDIAYIKIPNAGQMQPVKAFKIHNKIWVIPERDTFTNPEEGDLNPPPEAKQVPVSYYDSTYLSTDNEKDNYLKGVTKLFERIYSTDLGRMLLTSIVRGIPFWGGSTIDTELKVIDTNCINVIQPDGSYRSEELNLVIIGPSADIIQFECKSFGHEVLNLTRNGYGSTQYIRFSPDFTFGFEESLEVDTNPLLGAGKFATDPAVTLAHELIHAGHRLYGIAINPNRVFKVNTNAYYEMSGLEVSFEELRTFGGHDAKFIDSLQENEFRLYYYNKFKDIASTLNKAKSIVGTTASLQYMKNVFKEKYLLSEDTSGKFSVDKLKFDKLYKMLTEIYTEDNFVKFFKVLNRKTYLNFDKAVFKINIVPRVNYTIYDGFNLRNTNLAANFNGQNTEINNMNFTKLKNFTGLFEFYKLLCVRGIITSKTKS

SEQ ID NO: 103 - protein, 441 aa, Artificial Sequence
  Synthetic
MPFVNKQFNYKDPVNGVDIAYIKIPNAGQMQPVKAFKIHNKIWVIPERDTFTNPEEGDLNPPPEAKQVPVSYYDSTYLSTDNEKDNYLKGVTKLFERIYSTDLGRMLLTSIVRGIPFWGGSTIDTELKVIDTNCINVIQPDGSYRSEELNLVIIGPSADIIQFECKSFGHEVLNLTRNGYGSTQYIRFSPDFTFGFEESLEVDTNPLLGAGKFATDPAVTLAHELIHAGHRLYGIAINPNRVFKVNTNAYYEMSGLEVSFEELRTFGGHDAKFIDSLQENEFRLYYYNKFKDIASTLNKAKSIVGTTASLQYMKNVFKEKYLLSEDTSGKFSVDKLKFDKLYKMLTEIYTEDNFVKFFKVLNRKTYLNFDKAVFKINIVPKVNYTIRDGFNLRNTNLAANFNGQNTEINNMNFTKLKNFTGLFEFYKLLCVRGIITSKTKS

SEQ ID NO: 104 - protein, 441 aa, Artificial Sequence
  Synthetic
MPFVNKQFNYKDPVNGVDIAYIKIPNAGQMQPVKAFKIHNKIWVIPERDTFTNPEEGDLNPPPEAKQVPVSYYDSTYLSTDNEKDNYLKGVTKLFERIYSTDLGRMLLTSIVRGIPFWGGSTIDTELKVIDTNCINVIQPDGSYRSEELNLVIIGPSADIIQFECKSFGHEVLNLTRNGYGSTQYIRFSPDFTFGFEESLEVDTNPLLGAGKFATDPAVTLAHELIHAGHRLYGIAINPNRVFKVNTNAYYEMSGLEVSFEELRTFGGHDAKFIDSLQENEFRLYYYNKFKDIASTLNKAKSIVGTTASLQYMKNVFKEKYLLSEDTSGKFSVDKLKFDKLYKMLTEIYTEDNFVKFFKVLNRKTYLNFDKAVFKINIVPKVNYTIYDGFNLRNTNLAANFNGQNTEINNRNFTKLKNFTGLFEFYKLLCVRGIITSKTKS

SEQ ID NO: 105 - protein, 441 aa, Artificial Sequence
  Synthetic
MPFVNKQFNYKDPVNGVDIAYIKIPNAGQMQPVKAFKIHNKIWVIPERDTFTNPEEGDLNPPPEAKQVPVSYYDSTYLSTDNEKDNYLKGVTKLFERIYSTDLGRMLLTSIVRGIPFWGGSTIDTELKVIDTNCINVIQPDGSYRSEELNLVIIGPSADIIQFECKSFGHEVLNLTRNGYGSTQYIRFSPDFTFGFEESLEVDTNPLLGAGKFATDPAVTLAHELIHAGHRLYGIAINPNRVFKVNTNAYYEMSGLEVSFEELRTFGGHDAKFIDSLQENEFRLYYYNKFKDIASTLNKAKSIVGTTASLQYMKNVFKEKYLLSEDTSGKFSVDKLKFDKLYKMLTEIYTEDNFVKFFKVLNRKTYLNFDKAVFKINIVPKVNYTIYDGFNLRNTNLAANFNGQNTEINNMNFTRLKNFTGLFEFYKLLCVRGIITSKTKS

SEQ ID NO: 106 - protein, 441 aa, Artificial Sequence
  Synthetic
MPFVNKQFNYRDPVNGVDIAYIKIPNAGQMQPVKAFKIHNKIWVIPERDTFTNPEEGDLNPPPEAKQVPVSYYDSTYLSTDNEKDNYLKGVTKLFERIYSTDLGRMLLTSIVRGIPFWGGSTIDTELKVIDTNCINVIQPDGSYRSEELNLVIIGPSADIIQFECKSFGHEVLNLTRNGYGSTQYIRFSPDFTFGFEESLEVDTNPLLGAGKFATDPAVTLAHELIHAGHRLYGIAINPNRVFKVNTNAYYEMSGLEVSFEELRTFGGHDAKFIDSLQENEFRLYYYNKFKDIASTLNKAKSIVGTTASLQYMKNVFKEKYLLSEDTSGKFSVDRLRFDKLYRMLTEIYTEDNFVKFFKVLNRKTYLNFDKAVFRINIVPKVNYTIYDGFNLRNTNLAANFNGQNTEINNMNFTRLKNFTGLFEFYKLLCVRGIITSKTKS

SEQ ID NO: 107 - protein, 441 aa, Artificial Sequence
  Synthetic
MPFVNKQFNYKDPVNGVDIAYIKIPNAGQMQPVKAFKIHNRIWVIPERDTFTNPEEGDLNPPPEAKQVPVSYYDSTYLSTDNEKDNYLKGVTKLFERIYSTDLGRMLLTSIVRGIPFWGGSTIDTELKVIDTNCINVIQPDGSYRSEELNLVIIGPSADIIQFECKSFGHEVLNLTRNGYGSTQYIRFSPDFTFGFEESLEVDTNPLLGAGKFATDPAVTLAHELIHAGHRLYGIAINPNRVFKVNTNAYYEMSGLEVSFEELRTFGGHDAKFIDSLQENEFRLYYYNKFKDIASTLNKAKSIVGTTASLQYMKNVFREKYLLSEDTSGKFSVDKLKFDRLYKMLTEIYTEDNFVKFFKVLNRKTYLNFDKAVFKINIVPKVNYTIYDGFNLRNTNLAANFNGQNTEINNMNFTKLKNFTGLFEFYKLLCVRGIITSKTKS

SEQ ID NO: 108 - protein, 441 aa, Artificial Sequence
  Synthetic
MPFVNKQFNYKDPVNGVDIAYIKIPNAGQMQPVKAFKIHNKIWVIPERDTFTNPEEGDLNPPPEAKQVPVSYYDSTYLSTDNEKDNYLKGVTKLFERIYSTDLGRMLLTSIVRGIPFWGGSTIDTELKVIDTNCINVIQPDGSYRSEELNLVIIGPSADIIQFECKSFGHEVLNLTRNGYGSTQYIRFSPDFTFGFEESLEVDTNPLLGAGKFATDPAVTLAHELIHAGHRLYGIAINPNRVFKVNTNAYYEMSGLEVSFEELRTFGGHDAKFIDSLQENEFRLYYYNRFRDIASTLNRAKSIVGTTASLQYMKNVFKEKYLLSEDTSGKFSVDKLKFDKLYKMLTEIYTEDNFVKFFKVLNRKTYLNFDKAVFKINIVPRVNYTIYDGFNLRNTNLAANFNGQNTEINNMNFTKLKNFTGLFEFYKLLCVRGIITSKTKS

SEQ ID NO: 109 - protein, 441 aa, Artificial Sequence
  Synthetic
MPFVNKQFNYKDPVNGVDIAYIKIPNAGQMQPVKAFKIHNKIWVIPERDTFTNPEEGDLNPPPEAKQVPVSYYDSTYLSTDNEKDNYLKGVTKLFERIYSTDLGRMLLTSIVRGIPFWGGSTIDTELKVIDTNCINVIQPDGSYRSEELNLVIIGPSADIIQFECKSFGHEVLNLTRNGYGSTQYIRFSPDFTFGFEESLEVDTNPLLGAGRFATDPAVTLAHELIHAGHRLYGIAINPNRVFKVNTNAYYEMSGLEVSFEELRTFGGHDARFIDSLQENEFRLYYYNKFKDIASTLNKAKSIVGTTASLQYMKNVFKEKYLLSEDTSGKFSVDKLKFDKLYKMLTEIYTEDNFVRFFKVLNRKTYLNFDKAVFKINIVPKVNYTIYDGFNLRNTNLAANFNGQNTEINNMNFTKLKNFTGLFEFYKLLCVRGIITSKTKS

SEQ ID NO: 110 - protein, 441 aa, Artificial Sequence
  Synthetic
MPFVNKQFNYRDPVNGVDIAYIKIPNAGQMQPVKAFKIHNRIWVIPERDTFTNPEEGDLNPPPEAKQVPVSYYDSTYLSTDNEKDNYLKGVTKLFERIYSTDLGRMLLTSIVRGIPFWGGSTIDTELKVIDTNCINVIQPDGSYRSEELNLVIIGPSADIIQFECKSFGHEVLNLTRNGYGSTQYIRFSPDFTFGFEESLEVDTNPLLGAGKFATDPAVTLAHELIHAGHRLYGIAINPNRVFKVNTNAYYEMSGLEVSFEELRTFGGHDAKFIDSLQENEFRLYYYNKFKDIASTLNKAKSIVGTTASLQYMKNVFREKYLLSEDTSGKFSVDRLRFDRLYRMLTEIYTEDNFVKFFKVLNRKTYLNFDKAVFRINIVPKVNYTIYDGFNLRNTNLAANFNGQNTEINNMNFTRLKNFTGLFEFYKLLCVRGIITSKTKS

SEQ ID NO: 111 - protein, 441 aa, Artificial Sequence
  Synthetic
MPFVNKQFNYRDPVNGVDIAYIKIPNAGQMQPVKAFKIHNKIWVIPERDTFTNPEEGDLNPPPEAKQVPVSYYDSTYLSTDNEKDNYLKGVTKLFERIYSTDLGRMLLTSIVRGIPFWGGSTIDTELKVIDTNCINVIQPDGSYRSEELNLVIIGPSADIIQFECKSFGHEVLNLTRNGYGSTQYIRFSPDFTFGFEESLEVDTNPLLGAGKFATDPAVTLAHELIHAGHRLYGIAINPNRVFKVNTNAYYEMSGLEVSFEELRTFGGHDAKFIDSLQENEFRLYYYNRFRDIASTLNRAKSIVGTTASLQYMKNVFKEKYLLSEDTSGKFSVDRLRFDKLYRMLTEIYTEDNFVKFFKVLNRKTYLNFDKAVFRINIVPRVNYTIYDGFNLRNTNLAANFNGQNTEINNMNFTRLKNFTGLFEFYKLLCVRGIITSKTKS

SEQ ID NO: 112 - protein, 441 aa, Artificial Sequence
  Synthetic
MPFVNKQFNYRDPVNGVDIAYIKIPNAGQMQPVKAFKIHNRIWVIPERDTFTNPEEGDLNPPPEAKQVPVSYYDSTYLSTDNEKDNYLKGVTKLFERIYSTDLGRMLLTSIVRGIPFWGGSTIDTELKVIDTNCINVIQPDGSYRSEELNLVIIGPSADIIQFECKSFGHEVLNLTRNGYGSTQYIRFSPDFTFGFEESLEVDTNPLLGAGKFATDPAVTLAHELIHAGHRLYGIAINPNRVFKVNTNAYYEMSGLEVSFEELRTFGGHDAKFIDSLQENEFRLYYYNRFRDIASTLNRAKSIVGTTASLQYMKNVFKEKYLLSEDTSGKFSVDRLRFDKLYRMLTEIYTEDNFVKFFKVLNRKTYLNFDKAVFRINIVPRVNYTIYDGFNLRNTNLAANFNGQNTEINNMNFTRLKNFTGLFEFYKLLCVRGIITSKTKS

SEQ ID NO: 113 - protein, 441 aa, Artificial Sequence
  Synthetic
MPFVNKQFNYRDPVNGVDIAYIKIPNAGQMQPVKAFKIHNKIWVIPERDTFTNPEEGDLNPPPEAKQVPVSYYDSTYLSTDNEKDNYLKGVTKLFERIYSTDLGRMLLTSIVRGIPFWGGSTIDTELKVIDTNCINVIQPDGSYRSEELNLVIIGPSADIIQFECKSFGHEVLNLTRNGYGSTQYIRFSPDFTFGFEESLEVDTNPLLGAGRFATDPAVTLAHELIHAGHRLYGIAINPNRVFKVNTNAYYEMSGLEVSFEELRTFGGHDAKFIDSLQENEFRLYYYNRFRDIASTLNRAKSIVGTTASLQYMKNVFKEKYLLSEDTSGKFSVDRLRFDKLYRMLTEIYTEDNFVKFFKVLNRKTYLNFDKAVFRINIVPRVNYTIYDGFNLRNTNLAANFNGQNTEINNMNFTRLKNFTGLFEFYKLLCVRGIITSKTKS

SEQ ID NO: 114 - protein, 441 aa, Artificial Sequence
  Synthetic
MPFVNKQFNYRDPVNGVDIAYIKIPNAGQMQPVKAFKIHNKIWVIPERDTFTNPEEGDLNPPPEAKQVPVSYYDSTYLSTDNEKDNYLKGVTKLFERIYSTDLGRMLLTSIVRGIPFWGGSTIDTELKVIDTNCINVIQPDGSYRSEELNLVIIGPSADIIQFECKSFGHEVLNLTRNGYGSTQYIRFSPDFTFGFEESLEVDTNPLLGAGKFATDPAVTLAHELIHAGHRLYGIAINPNRVFKVNTNAYYEMSGLEVSFEELRTFGGHDARFIDSLQENEFRLYYYNRFRDIASTLNRAKSIVGTTASLQYMKNVFKEKYLLSEDTSGKFSVDRLRFDKLYRMLTEIYTEDNFVKFFKVLNRKTYLNFDKAVFRINIVPRVNYTIYDGFNLRNTNLAANFNGQNTEINNMNFTRLKNFTGLFEFYKLLCVRGIITSKTKS

SEQ ID NO: 115 - protein, 441 aa, Artificial Sequence
  Synthetic
MPFVNKQFNYRDPVNGVDIAYIKIPNAGQMQPVKAFKIHNKIWVIPERDTFTNPEEGDLNPPPEAKQVPVSYYDSTYLSTDNEKDNYLKGVTKLFERIYSTDLGRMLLTSIVRGIPFWGGSTIDTELKVIDTNCINVIQPDGSYRSEELNLVIIGPSADIIQFECKSFGHEVLNLTRNGYGSTQYIRFSPDFTFGFEESLEVDTNPLLGAGKFATDPAVTLAHELIHAGHRLYGIAINPNRVFKVNTNAYYEMSGLEVSFEELRTFGGHDAKFIDSLQENEFRLYYYNRFRDIASTLNRAKSIVGTTASLQYMKNVFREKYLLSEDTSGKFSVDRLRFDKLYRMLTEIYTEDNFVKFFKVLNRKTYLNFDKAVFRINIVPRVNYTIYDGFNLRNTNLAANFNGQNTEINNMNFTRLKNFTGLFEFYKLLCVRGIITSKTKS

SEQ ID NO: 116 - protein, 441 aa, Artificial Sequence
  Synthetic
MPFVNKQFNYRDPVNGVDIAYIKIPNAGQMQPVKAFKIHNKIWVIPERDTFTNPEEGDLNPPPEAKQVPVSYYDSTYLSTDNEKDNYLKGVTKLFERIYSTDLGRMLLTSIVRGIPFWGGSTIDTELKVIDTNCINVIQPDGSYRSEELNLVIIGPSADIIQFECKSFGHEVLNLTRNGYGSTQYIRFSPDFTFGFEESLEVDTNPLLGAGKFATDPAVTLAHELIHAGHRLYGIAINPNRVFKVNTNAYYEMSGLEVSFEELRTFGGHDAKFIDSLQENEFRLYYYNRFRDIASTLNRAKSIVGTTASLQYMKNVFKEKYLLSEDTSGKFSVDRLRFDRLYRMLTEIYTEDNFVKFFKVLNRKTYLNFDKAVFRINIVPRVNYTIYDGFNLRNTNLAANFNGQNTEINNMNFTRLKNFTGLFEFYKLLCVRGIITSKTKS

SEQ ID NO: 117 - protein, 441 aa, Artificial Sequence
  Synthetic
MPFVNKQFNYRDPVNGVDIAYIKIPNAGQMQPVKAFKIHNKIWVIPERDTFTNPEEGDLNPPPEAKQVPVSYYDSTYLSTDNEKDNYLKGVTKLFERIYSTDLGRMLLTSIVRGIPFWGGSTIDTELKVIDTNCINVIQPDGSYRSEELNLVIIGPSADIIQFECKSFGHEVLNLTRNGYGSTQYIRFSPDFTFGFEESLEVDTNPLLGAGKFATDPAVTLAHELIHAGHRLYGIAINPNRVFKVNTNAYYEMSGLEVSFEELRTFGGHDAKFIDSLQENEFRLYYYNRFRDIASTLNRAKSIVGTTASLQYMKNVFKEKYLLSEDTSGKFSVDRLRFDKLYRMLTEIYTEDNFVRFFKVLNRKTYLNFDKAVFRINIVPRVNYTIYDGFNLRNTNLAANFNGQNTEINNMNFTRLKNFTGLFEFYKLLCVRGIITSKTKS

SEQ ID NO: 118 - protein, 441 aa, Artificial Sequence
  Synthetic
MPFVNKQFNYRDPVNGVDIAYIKIPNAGQMQPVKAFKIHNRIWVIPERDTFTNPEEGDLNPPPEAKQVPVSYYDSTYLSTDNEKDNYLKGVTKLFERIYSTDLGRMLLTSIVRGIPFWGGSTIDTELKVIDTNCINVIQPDGSYRSEELNLVIIGPSADIIQFECKSFGHEVLNLTRNGYGSTQYIRFSPDFTFGFEESLEVDTNPLLGAGKFATDPAVTLAHELIHAGHRLYGIAINPNRVFKVNTNAYYEMSGLEVSFEELRTFGGHDAKFIDSLQENEFRLYYYNRFRDIASTLNRAKSIVGTTASLQYMKNVFREKYLLSEDTSGKFSVDRLRFDRLYRMLTEIYTEDNFVKFFKVLNRKTYLNFDKAVFRINIVPRVNYTIYDGFNLRNTNLAANFNGQNTEINNMNFTRLKNFTGLFEFYKLLCVRGIITSKTKS

SEQ ID NO: 119 - protein, 441 aa, Artificial Sequence
  Synthetic
MPFVNKQFNYRDPVNGVDIAYIKIPNAGQMQPVKAFKIHNRIWVIPERDTFTNPEEGDLNPPPEAKQVPVSYYDSTYLSTDNEKDNYLKGVTKLFERIYSTDLGRMLLTSIVRGIPFWGGSTIDTELKVIDTNCINVIQPDGSYRSEELNLVIIGPSADIIQFECKSFGHEVLNLTRNGYGSTQYIRFSPDFTFGFEESLEVDTNPLLGAGRFATDPAVTLAHELIHAGHRLYGIAINPNRVFKVNTNAYYEMSGLEVSFEELRTFGGHDAKFIDSLQENEFRLYYYNRFRDIASTLNRAKSIVGTTASLQYMKNVFREKYLLSEDTSGKFSVDRLRFDRLYRMLTEIYTEDNFVRFFKVLNRKTYLNFDKAVFRINIVPRVNYTIYDGFNLRNTNLAANFNGQNTEINNMNFTRLKNFTGLFEFYKLLCVRGIITSKTKS

SEQ ID NO: 120 - protein, 441 aa, Artificial Sequence
  Synthetic
MPFVNKQFNYRDPVNGVDIAYIKIPNAGQMQPVKAFKIHNRIWVIPERDTFTNPEEGDLNPPPEAKQVPVSYYDSTYLSTDNEKDNYLKGVTKLFERIYSTDLGRMLLTSIVRGIPFWGGSTIDTELKVIDTNCINVIQPDGSYRSEELNLVIIGPSADIIQFECKSFGHEVLNLTRNGYGSTQYIRFSPDFTFGFEESLEVDTNPLLGAGRFATDPAVTLAHELIHAGHRLYGIAINPNRVFKVNTNAYYEMSGLEVSFEELRTFGGHDARFIDSLQENEFRLYYYNRFRDIASTLNRAKSIVGTTASLQYMKNVFREKYLLSEDTSGKFSVDRLRFDRLYRMLTEIYTEDNFVRFFKVLNRKTYLNFDKAVFRINIVPRVNYTIYDGFNLRNTNLAANFNGQNTEINNMNFTRLKNFTGLFEFYKLLCVRGIITSKTKS

SEQ ID NO: 121 - protein, 441 aa, Clostridium botulinum
MPFVNKQFNYKDPVNGVDIAYIKIPNAGQMQPVKAFKIHNKIWVIPERDTFTNPEEGDLNPPPEAKQVPVSYYDSTYLSTDNEKDNYLKGVTKLFERIYSTDLGRMLLTSIVRGIPFWGGSTIDTELKVIDTNCINVIQPDGSYRSEELNLVIIGPSADIIQFECKSFGHDVLNLTRNGYGSTQYIRFSPDFTFGFEESLEVDTNPLLGAGKFATDPAVTLAHELIHAEHRLYGIAINPNRVFKVNTNAYYEMSGLEVSFEELRTFGGHDAKFIDSLQENEFRLYYYNKFKDVASTLNKAKSIIGTTASLQYMKNVFKEKYLLSEDTSGKFSVDKLKFDKLYKMLTEIYTEDNFVNFFKVINRKTYLNFDKAVFRINIVPDENYTIKDGFNLKGANLSTNFNGQNTEINSRNFTRLKNFTGLFEFYKLLCVRGIIPFKTKS

SEQ ID NO: 122 - protein, 441 aa, Artificial Sequence
  Synthetic
MPFVNKQFNYRDPVNGVDIAYIKIPNAGQMQPVKAFKIHNKIWVIPERDTFTNPEEGDLNPPPEAKQVPVSYYDSTYLSTDNEKDNYLKGVTKLFERIYSTDLGRMLLTSIVRGIPFWGGSTIDTELKVIDTNCINVIQPDGSYRSEELNLVIIGPSADIIQFECKSFGHDVLNLTRNGYGSTQYIRFSPDFTFGFEESLEVDTNPLLGAGKFATDPAVTLAHELIHAEHRLYGIAINPNRVFKVNTNAYYEMSGLEVSFEELRTFGGHDAKFIDSLQENEFRLYYYNKFKDVASTLNKAKSIIGTTASLQYMKNVFKEKYLLSEDTSGKFSVDKLKFDKLYKMLTEIYTEDNFVNFFKVINRKTYLNFDKAVFRINIVPDENYTIKDGFNLKGANLSTNFNGQNTEINSRNFTRLKNFTGLFEFYKLLCVRGIIPFKTKS

SEQ ID NO: 123 - protein, 441 aa, Artificial Sequence
  Synthetic
MPFVNKQFNYKDPVNGVDIAYIKIPNAGQMQPVKAFKIHNKIWVIPERDTFTNPEEGDLNPPPEAKQVPVSYYDSTYLSTDNEKDNYLKGVTKLFERIYSTDLGRMLLTSIVRGIPFWGGSTIDTELKVIDTNCINVIQPDGSYRSEELNLVIIGPSADIIQFECKSFGHDVLNLTRNGYGSTQYIRFSPDFTFGFEESLEVDTNPLLGAGKFATDPAVTLAHELIHAEHRLYGIAINPNRVFKVNTNAYYEMSGLEVSFEELRTFGGHDAKFIDSLQENEFRLYYYNRFKDVASTLNKAKSIIGTTASLQYMKNVFKEKYLLSEDTSGKFSVDKLKFDKLYKMLTEIYTEDNFVNFFKVINRKTYLNFDKAVFRINIVPDENYTIKDGFNLKGANLSTNFNGQNTEINSRNFTRLKNFTGLFEFYKLLCVRGIIPFKTKS

SEQ ID NO: 124 - protein, 441 aa, Artificial Sequence
  Synthetic
MPFVNKQFNYKDPVNGVDIAYIKIPNAGQMQPVKAFKIHNKIWVIPERDTFTNPEEGDLNPPPEAKQVPVSYYDSTYLSTDNEKDNYLKGVTKLFERIYSTDLGRMLLTSIVRGIPFWGGSTIDTELKVIDTNCINVIQPDGSYRSEELNLVIIGPSADIIQFECKSFGHDVLNLTRNGYGSTQYIRFSPDFTFGFEESLEVDTNPLLGAGKFATDPAVTLAHELIHAEHRLYGIAINPNRVFKVNTNAYYEMSGLEVSFEELRTFGGHDAKFIDSLQENEFRLYYYNKFRDVASTLNKAKSIIGTTASLQYMKNVFKEKYLLSEDTSGKFSVDKLKFDKLYKMLTEIYTEDNFVNFFKVINRKTYLNFDKAVFRINIVPDENYTIKDGFNLKGANLSTNFNGQNTEINSRNFTRLKNFTGLFEFYKLLCVRGIIPFKTKS

SEQ ID NO: 125 - protein, 441 aa, Artificial Sequence
  Synthetic
MPFVNKQFNYKDPVNGVDIAYIKIPNAGQMQPVKAFKIHNKIWVIPERDTFTNPEEGDLNPPPEAKQVPVSYYDSTYLSTDNEKDNYLKGVTKLFERIYSTDLGRMLLTSIVRGIPFWGGSTIDTELKVIDTNCINVIQPDGSYRSEELNLVIIGPSADIIQFECKSFGHDVLNLTRNGYGSTQYIRFSPDFTFGFEESLEVDTNPLLGAGKFATDPAVTLAHELIHAEHRLYGIAINPNRVFKVNTNAYYEMSGLEVSFEELRTFGGHDAKFIDSLQENEFRLYYYNKFKDVASTLNRAKSIIGTTASLQYMKNVFKEKYLLSEDTSGKFSVDKLKFDKLYKMLTEIYTEDNFVNFFKVINRKTYLNFDKAVFRINIVPDENYTIKDGFNLKGANLSTNFNGQNTEINSRNFTRLKNFTGLFEFYKLLCVRGIIPFKTKS

SEQ ID NO: 126 - protein, 441 aa, Artificial Sequence
  Synthetic
MPFVNKQFNYKDPVNGVDIAYIKIPNAGQMQPVKAFKIHNKIWVIPERDTFTNPEEGDLNPPPEAKQVPVSYYDSTYLSTDNEKDNYLKGVTKLFERIYSTDLGRMLLTSIVRGIPFWGGSTIDTELKVIDTNCINVIQPDGSYRSEELNLVIIGPSADIIQFECKSFGHDVLNLTRNGYGSTQYIRFSPDFTFGFEESLEVDTNPLLGAGKFATDPAVTLAHELIHAEHRLYGIAINPNRVFKVNTNAYYEMSGLEVSFEELRTFGGHDAKFIDSLQENEFRLYYYNKFKDVASTLNKAKSIIGTTASLQYMKNVFKEKYLLSEDTSGKFSVDRLKFDKLYKMLTEIYTEDNFVNFFKVINRKTYLNFDKAVFRINIVPDENYTIKDGFNLKGANLSTNFNGQNTEINSRNFTRLKNFTGLFEFYKLLCVRGIIPFKTKS

SEQ ID NO: 127 - protein, 441 aa, Artificial Sequence
  Synthetic
MPFVNKQFNYKDPVNGVDIAYIKIPNAGQMQPVKAFKIHNKIWVIPERDTFTNPEEGDLNPPPEAKQVPVSYYDSTYLSTDNEKDNYLKGVTKLFERIYSTDLGRMLLTSIVRGIPFWGGSTIDTELKVIDTNCINVIQPDGSYRSEELNLVIIGPSADIIQFECKSFGHDVLNLTRNGYGSTQYIRFSPDFTFGFEESLEVDTNPLLGAGKFATDPAVTLAHELIHAEHRLYGIAINPNRVFKVNTNAYYEMSGLEVSFEELRTFGGHDAKFIDSLQENEFRLYYYNKFKDVASTLNKAKSIIGTTASLQYMKNVFKEKYLLSEDTSGKFSVDKLRFDKLYKMLTEIYTEDNFVNFFKVINRKTYLNFDKAVFRINIVPDENYTIKDGFNLKGANLSTNFNGQNTEINSRNFTRLKNFTGLFEFYKLLCVRGIIPFKTKS

SEQ ID NO: 128 - protein, 441 aa, Artificial Sequence
  Synthetic
MPFVNKQFNYKDPVNGVDIAYIKIPNAGQMQPVKAFKIHNKIWVIPERDTFTNPEEGDLNPPPEAKQVPVSYYDSTYLSTDNEKDNYLKGVTKLFERIYSTDLGRMLLTSIVRGIPFWGGSTIDTELKVIDTNCINVIQPDGSYRSEELNLVIIGPSADIIQFECKSFGHDVLNLTRNGYGSTQYIRFSPDFTFGFEESLEVDTNPLLGAGKFATDPAVTLAHELIHAEHRLYGIAINPNRVFKVNTNAYYEMSGLEVSFEELRTFGGHDAKFIDSLQENEFRLYYYNKFKDVASTLNKAKSIIGTTASLQYMKNVFKEKYLLSEDTSGKFSVDKLKFDKLYRMLTEIYTEDNFVNFFKVINRKTYLNFDKAVFRINIVPDENYTIKDGFNLKGANLSTNFNGQNTEINSRNFTRLKNFTGLFEFYKLLCVRGIIPFKTKS

SEQ ID NO: 129 - protein, 441 aa, Artificial Sequence
  Synthetic
MPFVNKQFNYRDPVNGVDIAYIKIPNAGQMQPVKAFKIHNKIWVIPERDTFTNPEEGDLNPPPEAKQVPVSYYDSTYLSTDNEKDNYLKGVTKLFERIYSTDLGRMLLTSIVRGIPFWGGSTIDTELKVIDTNCINVIQPDGSYRSEELNLVIIGPSADIIQFECKSFGHDVLNLTRNGYGSTQYIRFSPDFTFGFEESLEVDTNPLLGAGKFATDPAVTLAHELIHAEHRLYGIAINPNRVFKVNTNAYYEMSGLEVSFEELRTFGGHDAKFIDSLQENEFRLYYYNRFRDVASTLNRAKSIIGTTASLQYMKNVFKEKYLLSEDTSGKFSVDRLRFDKLYRMLTEIYTEDNFVNFFKVINRKTYLNFDKAVFRINIVPDENYTIKDGFNLKGANLSTNFNGQNTEINSRNFTRLKNFTGLFEFYKLLCVRGIIPFKTKS

SEQ ID NO: 130 - protein, 5 aa, Artificial Sequence
  Synthetic
LPETG

SEQ ID NO: 131 - protein, 424 aa, Artificial Sequence
  Synthetic
IINTSILNLRYESNHLIDLSRYASKINIGSKVNFDPIDKNQIQLRNLESSKIEVILKNAIVYNSMYENFSTSFWIRIPKYFNSISLNNEYTIINCMENNSGWKVSLNYGEIIWTLQDTQEIKQRVVFKYSQMINISDYINRWIFVTITNNRLNNSKIYINGRLIDQKPISNLGNIHASNNIMFKLDGCRDTHRYIWIKYFNLFDKELNEKEIKDLYDNQSNSGILKDFWGDYLQYDKPYYMLNLYDPNKYVDVNNVGIRGYMYLKGPRGSVMTTNIYLNSSLYRGTKFIIKKYASGNKDNIVRNNDRVYINVVVKNKEYRLATNASQAGVEKILSALEIPDVGNLSQVVVMKSKNDQGITNKCKMNLQDNNGNDIGFIGFHQFNNIAKLVASNWYNRQIERSSRTLGCSWEFIPVDDGWGERPL

SEQ ID NO: 132 - protein, 424 aa, Artificial Sequence
  Synthetic
IINTSILNLRYESNHLIDLSRYASKINIGSKVNFDPIDKNQIQLKNLESSKIEVILKNAIVYNSMYENFSTSFWIRIPKYFNSISLNNEYTIINCMENNSGWKVSLNYGEIIWTLQDTQEIKQRVVFKYSQMINISDYINRWIFVTITNNRLNNSKIYINGRLIDQKPISNLGNIHASNNIMFKLDGCRDTHRYIWIKYFNLFDKELNEKEIKDLYDNQSNSGILKDFWGDYLQYDKPYYMLNLYDPNKYVDVNNVGIRGYMYLKGPRGSVMTTNIYLNSSLYRGTKFIIKKYASGNKDNIVRNNDRVYINVVVKNKEYRLATNASQAGVEKILSALEIPDVGNLSQVVVMKSKNDQGITNKCKMNLQDNNGNDIGFIGFHQFNNIAKLVASNWYNRQIERSSRTLGCSWEFIPVDDGWGERPL

SEQ ID NO: 133 - protein, 424 aa, Artificial Sequence
  Synthetic
IINTSILNLRYESNHLIDLSRYASKINIGSKVNFDPIDKNQIQLFNLESSKIEVILKNAIVYNSMYENFSTSFWIRIPKYHNSISLNNEYTIINCMENNSGWKVSLNYGEIIWTLQDTQEIKQRVVFKYSQMINISDYINRWIFVTITNNRLNNSKIYINGRLIDQKPISNLGNIHASNNIMFKLDGCRDTHRYIWIKYFNLFDKELNEKEIKDLYDNQSNSGILKDFWGDYLQYDKPYYMLNLYDPNKYVDVNNVGIRGYMYLKGPRGSVMTTNIYLNSSLYRGTKFIIKKYASGNKDNIVRNNDRVYINVVVKNKEYRLATNASQAGVEKILSALEIPDVGNLSQVVVMKSKNDQGITNKCKMNLQDNNGNDIGFIGFHQFNNIAKLVASNWYNRQIERSSRTLGCSWEFIPVDDGWGERPL

SEQ ID NO: 134 - protein, 424 aa, Artificial Sequence
  Synthetic
IINTSILNLRYESNHLIDLSRYASKINIGSKVNFDPIDKNQIQLFNLESSKIEVILKNAIVYNSMYENFSTSFWIRIPKYYNSISLNNEYTIINCMENNSGWKVSLNYGEIIWTLQDTQEIKQRVVFKYSQMINISDYINRWIFVTITNNRLNNSKIYINGRLIDQKPISNLGNIHASNNIMFKLDGCRDTHRYIWIKYFNLFDKELNEKEIKDLYDNQSNSGILKDFWGDYLQYDKPYYMLNLYDPNKYVDVNNVGIRGYMYLKGPRGSVMTTNIYLNSSLYRGTKFIIKKYASGNKDNIVRNNDRVYINVVVKNKEYRLATNASQAGVEKILSALEIPDVGNLSQVVVMKSKNDQGITNKCKMNLQDNNGNDIGFIGFHQFNNIAKLVASNWYNRQIERSSRTLGCSWEFIPVDDGWGERPL

SEQ ID NO: 135 - protein, 424 aa, Artificial Sequence
  Synthetic
IINTSILNLRYESNHLIDLSRYASKINIGSKVNFDPIDKNQIQLFNLESSKIEVILKNAIVYNSMYENFSTSFWIRIPKYFSSISLNNEYTIINCMENNSGWKVSLNYGEIIWTLQDTQEIKQRVVFKYSQMINISDYINRWIFVTITNNRLNNSKIYINGRLIDQKPISNLGNIHASNNIMFKLDGCRDTHRYIWIKYFNLFDKELNEKEIKDLYDNQSNSGILKDFWGDYLQYDKPYYMLNLYDPNKYVDVNNVGIRGYMYLKGPRGSVMTTNIYLNSSLYRGTKFIIKKYASGNKDNIVRNNDRVYINVVVKNKEYRLATNASQAGVEKILSALEIPDVGNLSQVVVMKSKNDQGITNKCKMNLQDNNGNDIGFIGFHQFNNIAKLVASNWYNRQIERSSRTLGCSWEFIPVDDGWGERPL

SEQ ID NO: 136 - protein, 424 aa, Artificial Sequence
  Synthetic
IINTSILNLRYESNHLIDLSRYASKINIGSKVNFDPIDKNQIQLFNLESSKIEVILKNAIVYNSMYENFSTSFWIRIPKYFNKISLNNEYTIINCMENNSGWKVSLNYGEIIWTLQDTQEIKQRVVFKYSQMINISDYINRWIFVTITNNRLNNSKIYINGRLIDQKPISNLGNIHASNNIMFKLDGCRDTHRYIWIKYFNLFDKELNEKEIKDLYDNQSNSGILKDFWGDYLQYDKPYYMLNLYDPNKYVDVNNVGIRGYMYLKGPRGSVMTTNIYLNSSLYRGTKFIIKKYASGNKDNIVRNNDRVYINVVVKNKEYRLATNASQAGVEKILSALEIPDVGNLSQVVVMKSKNDQGITNKCKMNLQDNNGNDIGFIGFHQFNNIAKLVASNWYNRQIERSSRTLGCSWEFIPVDDGWGERPL

SEQ ID NO: 137 - protein, 424 aa, Artificial Sequence
  Synthetic
IINTSILNLRYESNHLIDLSRYASKINIGSKVNFDPIDKNQIQLFNLESSKIEVILKNAIVYNSMYENFSTSFWIRIPKYFNSINLNNEYTIINCMENNSGWKVSLNYGEIIWTLQDTQEIKQRVVFKYSQMINISDYINRWIFVTITNNRLNNSKIYINGRLIDQKPISNLGNIHASNNIMFKLDGCRDTHRYIWIKYFNLFDKELNEKEIKDLYDNQSNSGILKDFWGDYLQYDKPYYMLNLYDPNKYVDVNNVGIRGYMYLKGPRGSVMTTNIYLNSSLYRGTKFIIKKYASGNKDNIVRNNDRVYINVVVKNKEYRLATNASQAGVEKILSALEIPDVGNLSQVVVMKSKNDQGITNKCKMNLQDNNGNDIGFIGFHQFNNIAKLVASNWYNRQIERSSRTLGCSWEFIPVDDGWGERPL

SEQ ID NO: 138 - protein, 424 aa, Artificial Sequence
  Synthetic
IINTSILNLRYESNHLIDLSRYASKINIGSKVNFDPIDKNQIQLFNLESSKIEVILKNAIVYNSMYENFSTSFWIRIPKYFNSISLNNEYTIINCIENNSGWKVSLNYGEIIWTLQDTQEIKQRVVFKYSQMINISDYINRWIFVTITNNRLNNSKIYINGRLIDQKPISNLGNIHASNNIMFKLDGCRDTHRYIWIKYFNLFDKELNEKEIKDLYDNQSNSGILKDFWGDYLQYDKPYYMLNLYDPNKYVDVNNVGIRGYMYLKGPRGSVMTTNIYLNSSLYRGTKFIIKKYASGNKDNIVRNNDRVYINVVVKNKEYRLATNASQAGVEKILSALEIPDVGNLSQVVVMKSKNDQGITNKCKMNLQDNNGNDIGFIGFHQFNNIAKLVASNWYNRQIERSSRTLGCSWEFIPVDDGWGERPL

SEQ ID NO: 139 - protein, 424 aa, Artificial Sequence
  Synthetic
IINTSILNLRYESNHLIDLSRYASKINIGSKVNFDPIDKNQIQLFNLESSKIEVILKNAIVYNSMYENFSTSFWIRIPKYFNSISLNNEYTIINCMENNSGWKVSLNYGEIIWTLQDTQEIKQRVVFKYSQMINISDYINRWIFVTITNNRLTNSKIYINGRLIDQKPISNLGNIHASNNIMFKLDGCRDTHRYIWIKYFNLFDKELNEKEIKDLYDNQSNSGILKDFWGDYLQYDKPYYMLNLYDPNKYVDVNNVGIRGYMYLKGPRGSVMTTNIYLNSSLYRGTKFIIKKYASGNKDNIVRNNDRVYINVVVKNKEYRLATNASQAGVEKILSALEIPDVGNLSQVVVMKSKNDQGITNKCKMNLQDNNGNDIGFIGFHQFNNIAKLVASNWYNRQIERSSRTLGCSWEFIPVDDGWGERPL

SEQ ID NO: 140 - protein, 424 aa, Artificial Sequence
  Synthetic
IINTSILNLRYESNHLIDLSRYASKINIGSKVNFDPIDKNQIQLFNLESSKIEVILKNAIVYNSMYENFSTSFWIRIPKYFNSISLNNEYTIINCMENNSGWKVSLNYGEIIWTLQDTQEIKQRVVFKYSQMINISDYINRWIFVTITNNRLNKSKIYINGRLIDQKPISNLGNIHASNNIMFKLDGCRDTHRYIWIKYFNLFDKELNEKEIKDLYDNQSNSGILKDFWGDYLQYDKPYYMLNLYDPNKYVDVNNVGIRGYMYLKGPRGSVMTTNIYLNSSLYRGTKFIIKKYASGNKDNIVRNNDRVYINVVVKNKEYRLATNASQAGVEKILSALEIPDVGNLSQVVVMKSKNDQGITNKCKMNLQDNNGNDIGFIGFHQFNNIAKLVASNWYNRQIERSSRTLGCSWEFIPVDDGWGERPL

SEQ ID NO: 141 - protein, 424 aa, Artificial Sequence
  Synthetic
IINTSILNLRYESNHLIDLSRYASKINIGSKVNFDPIDKNQIQLFNLESSKIEVILKNAIVYNSMYENFSTSFWIRIPKYFNSISLNNEYTIINCMENNSGWKVSLNYGEIIWTLQDTQEIKQRVVFKYSQMINISDYINRWIFVTITNNRLNNSKIYINGRLIDQKPISNLGNIHASNKIMFKLDGCRDTHRYIWIKYFNLFDKELNEKEIKDLYDNQSNSGILKDFWGDYLQYDKPYYMLNLYDPNKYVDVNNVGIRGYMYLKGPRGSVMTTNIYLNSSLYRGTKFIIKKYASGNKDNIVRNNDRVYINVVVKNKEYRLATNASQAGVEKILSALEIPDVGNLSQVVVMKSKNDQGITNKCKMNLQDNNGNDIGFIGFHQFNNIAKLVASNWYNRQIERSSRTLGCSWEFIPVDDGWGERPL

SEQ ID NO: 142 - protein, 424 aa, Artificial Sequence
  Synthetic
IINTSILNLRYESNHLIDLSRYASKINIGSKVNFDPIDKNQIQLFNLESSKIEVILKNAIVYNSMYENFSTSFWIRIPKYFNSISLNNEYTIINCMENNSGWKVSLNYGEIIWTLQDTQEIKQRVVFKYSQMINISDYINRWIFVTITNNRLNNSKIYINGRLIDQKPISNLGNIHASNNIMFKLDGCRETHRYIWIKYFNLFDKELNEKEIKDLYDNQSNSGILKDFWGDYLQYDKPYYMLNLYDPNKYVDVNNVGIRGYMYLKGPRGSVMTTNIYLNSSLYRGTKFIIKKYASGNKDNIVRNNDRVYINVVVKNKEYRLATNASQAGVEKILSALEIPDVGNLSQVVVMKSKNDQGITNKCKMNLQDNNGNDIGFIGFHQFNNIAKLVASNWYNRQIERSSRTLGCSWEFIPVDDGWGERPL

SEQ ID NO: 143 - protein, 424 aa, Artificial Sequence
  Synthetic
IINTSILNLRYESNHLIDLSRYASKINIGSKVNFDPIDKNQIQLFNLESSKIEVILKNAIVYNSMYENFSTSFWIRIPKYFNSISLNNEYTIINCMENNSGWKVSLNYGEIIWTLQDTQEIKQRVVFKYSQMINISDYINRWIFVTITNNRLNNSKIYINGRLIDQKPISNLGNIHASNNIMFKLDGCRDPHRYIWIKYFNLFDKELNEKEIKDLYDNQSNSGILKDFWGDYLQYDKPYYMLNLYDPNKYVDVNNVGIRGYMYLKGPRGSVMTTNIYLNSSLYRGTKFIIKKYASGNKDNIVRNNDRVYINVVVKNKEYRLATNASQAGVEKILSALEIPDVGNLSQVVVMKSKNDQGITNKCKMNLQDNNGNDIGFIGFHQFNNIAKLVASNWYNRQIERSSRTLGCSWEFIPVDDGWGERPL

SEQ ID NO: 144 - protein, 424 aa, Artificial Sequence
  Synthetic
IINTSILNLRYESNHLIDLSRYASKINIGSKVNFDPIDKNQIQLFNLESSKIEVILKNAIVYNSMYENFSTSFWIRIPKYFNSISLNNEYTIINCMENNSGWKVSLNYGEIIWTLQDTQEIKQRVVFKYSQMINISDYINRWIFVTITNNRLNNSKIYINGRLIDQKPISNLGNIHASNNIMFKLDGCRDTRRYIWIKYFNLFDKELNEKEIKDLYDNQSNSGILKDFWGDYLQYDKPYYMLNLYDPNKYVDVNNVGIRGYMYLKGPRGSVMTTNIYLNSSLYRGTKFIIKKYASGNKDNIVRNNDRVYINVVVKNKEYRLATNASQAGVEKILSALEIPDVGNLSQVVVMKSKNDQGITNKCKMNLQDNNGNDIGFIGFHQFNNIAKLVASNWYNRQIERSSRTLGCSWEFIPVDDGWGERPL

SEQ ID NO: 145 - protein, 424 aa, Artificial Sequence
  Synthetic
IINTSILNLRYESNHLIDLSRYASKINIGSKVNFDPIDKNQIQLFNLESSKIEVILKNAIVYNSMYENFSTSFWIRIPKYFNSISLNNEYTIINCMENNSGWKVSLNYGEIIWTLQDTQEIKQRVVFKYSQMINISDYINRWIFVTITNNRLNNSKIYINGRLIDQKPISNLGNIHASNNIMFKLDGCRDTQRYIWIKYFNLFDKELNEKEIKDLYDNQSNSGILKDFWGDYLQYDKPYYMLNLYDPNKYVDVNNVGIRGYMYLKGPRGSVMTTNIYLNSSLYRGTKFIIKKYASGNKDNIVRNNDRVYINVVVKNKEYRLATNASQAGVEKILSALEIPDVGNLSQVVVMKSKNDQGITNKCKMNLQDNNGNDIGFIGFHQFNNIAKLVASNWYNRQIERSSRTLGCSWEFIPVDDGWGERPL

SEQ ID NO: 146 - protein, 424 aa, Artificial Sequence
  Synthetic
IINTSILNLRYESNHLIDLSRYASKINIGSKVNFDPIDKNQIQLFNLESSKIEVILKNAIVYNSMYENFSTSFWIRIPKYFNSISLNNEYTIINCMENNSGWKVSLNYGEIIWTLQDTQEIKQRVVFKYSQMINISDYINRWIFVTITNNRLNNSKIYINGRLIDQKPISNLGNIHASNNIMFKLDGCRDTHNYIWIKYFNLFDKELNEKEIKDLYDNQSNSGILKDFWGDYLQYDKPYYMLNLYDPNKYVDVNNVGIRGYMYLKGPRGSVMTTNIYLNSSLYRGTKFIIKKYASGNKDNIVRNNDRVYINVVVKNKEYRLATNASQAGVEKILSALEIPDVGNLSQVVVMKSKNDQGITNKCKMNLQDNNGNDIGFIGFHQFNNIAKLVASNWYNRQIERSSRTLGCSWEFIPVDDGWGERPL

SEQ ID NO: 147 - protein, 424 aa, Artificial Sequence
  Synthetic
IINTSILNLRYESNHLIDLSRYASKINIGSKVNFDPIDKNQIQLFNLESSKIEVILKNAIVYNSMYENFSTSFWIRIPKYFNSISLNNEYTIINCMENNSGWKVSLNYGEIIWTLQDTQEIKQRVVFKYSQMINISDYINRWIFVTITNNRLNNSKIYINGRLIDQKPISNLGNIHASNNIMFKLDGCRDTHRRIWIKYFNLFDKELNEKEIKDLYDNQSNSGILKDFWGDYLQYDKPYYMLNLYDPNKYVDVNNVGIRGYMYLKGPRGSVMTTNIYLNSSLYRGTKFIIKKYASGNKDNIVRNNDRVYINVVVKNKEYRLATNASQAGVEKILSALEIPDVGNLSQVVVMKSKNDQGITNKCKMNLQDNNGNDIGFIGFHQFNNIAKLVASNWYNRQIERSSRTLGCSWEFIPVDDGWGERPL

SEQ ID NO: 148 - protein, 424 aa, Artificial Sequence
  Synthetic
IINTSILNLRYESNHLIDLSRYASKINIGSKVNFDPIDKNQIQLFNLESSKIEVILKNAIVYNSMYENFSTSFWIRIPKYFNSISLNNEYTIINCMENNSGWKVSLNYGEIIWTLQDTQEIKQRVVFKYSQMINISDYINRWIFVTITNNRLNNSKIYINGRLIDQKPISNLGNIHASNNIMFKLDGCRDTHRKIWIKYFNLFDKELNEKEIKDLYDNQSNSGILKDFWGDYLQYDKPYYMLNLYDPNKYVDVNNVGIRGYMYLKGPRGSVMTTNIYLNSSLYRGTKFIIKKYASGNKDNIVRNNDRVYINVVVKNKEYRLATNASQAGVEKILSALEIPDVGNLSQVVVMKSKNDQGITNKCKMNLQDNNGNDIGFIGFHQFNNIAKLVASNWYNRQIERSSRTLGCSWEFIPVDDGWGERPL

SEQ ID NO: 149 - protein, 424 aa, Artificial Sequence
  Synthetic
IINTSILNLRYESNHLIDLSRYASKINIGSKVNFDPIDKNQIQLFNLESSKIEVILKNAIVYNSMYENFSTSFWIRIPKYFNSISLNNEYTIINCMENNSGWKVSLNYGEIIWTLQDTQEIKQRVVFKYSQMINISDYINRWIFVTITNNRLNNSKIYINGRLIDQKPISNLGNIHASNNIMFKLDGCRDTHRYIWIKYFNLFDKELNEKEIKDLYDNQSNSGILKDFWGDYLQYDKPYYMLNLYDPNKYVDVNNVGIRGYMYLKGPRGSVMYTNIYLNSSLYRGTKFIIKKYASGNKDNIVRNNDRVYINVVVKNKEYRLATNASQAGVEKILSALEIPDVGNLSQVVVMKSKNDQGITNKCKMNLQDNNGNDIGFIGFHQFNNIAKLVASNWYNRQIERSSRTLGCSWEFIPVDDGWGERPL

SEQ ID NO: 150 - protein, 424 aa, Artificial Sequence
  Synthetic
IINTSILNLRYESNHLIDLSRYASKINIGSKVNFDPIDKNQIQLFNLESSKIEVILKNAIVYNSMYENFSTSFWIRIPKYFNSISLNNEYTIINCMENNSGWKVSLNYGEIIWTLQDTQEIKQRVVFKYSQMINISDYINRWIFVTITNNRLNNSKIYINGRLIDQKPISNLGNIHASNNIMFKLDGCRDTHRYIWIKYFNLFDKELNEKEIKDLYDNQSNSGILKDFWGDYLQYDKPYYMLNLYDPNKYVDVNNVGIRGYMYLKGPRGSVMTTNIYLNSSLYMGTKFIIKKYASGNKDNIVRNNDRVYINVVVKNKEYRLATNASQAGVEKILSALEIPDVGNLSQVVVMKSKNDQGITNKCKMNLQDNNGNDIGFIGFHQFNNIAKLVASNWYNRQIERSSRTLGCSWEFIPVDDGWGERPL

SEQ ID NO: 151 - protein, 424 aa, Artificial Sequence
  Synthetic
IINTSILNLRYESNHLIDLSRYASKINIGSKVNFDPIDKNQIQLFNLESSKIEVILKNAIVYNSMYENFSTSFWIRIPKYFNSISLNNEYTIINCMENNSGWKVSLNYGEIIWTLQDTQEIKQRVVFKYSQMINISDYINRWIFVTITNNRLNNSKIYINGRLIDQKPISNLGNIHASNNIMFKLDGCRDTHRYIWIKYFNLFDKELNEKEIKDLYDNQSNSGILKDFWGDYLQYDKPYYMLNLYDPNKYVDVNNVGIRGYMYLKGPRGSVMTTNIYLNSSLYIGTKFIIKKYASGNKDNIVRNNDRVYINVVVKNKEYRLATNASQAGVEKILSALEIPDVGNLSQVVVMKSKNDQGITNKCKMNLQDNNGNDIGFIGFHQFNNIAKLVASNWYNRQIERSSRTLGCSWEFIPVDDGWGERPL

SEQ ID NO: 152 - protein, 424 aa, Artificial Sequence
  Synthetic
IINTSILNLRYESNHLIDLSRYASKINIGSKVNFDPIDKNQIQLFNLESSKIEVILKNAIVYNSMYENFSTSFWIRIPKYFNSISLNNEYTIINCMENNSGWKVSLNYGEIIWTLQDTQEIKQRVVFKYSQMINISDYINRWIFVTITNNRLNNSKIYINGRLIDQKPISNLGNIHASNNIMFKLDGCRDTHRYIWIKYFNLFDKELNEKEIKDLYDNQSNSGILKDFWGDYLQYDKPYYMLNLYDPNKYVDVNNVGIRGYMYLKGPRGSVMTTNIYLNSSLYRGTKFIIKKYASGNKDNIVRNNDRVYINVVVKNKEYRLATNASQAGVEKILSALEIPDVGNLSQVVVMKSKNDQGIRNKCKMNLQDNNGNDIGFIGFHQFNNIAKLVASNWYNRQIERSSRTLGCSWEFIPVDDGWGERPL

SEQ ID NO: 153 - protein, 424 aa, Artificial Sequence
  Synthetic
IINTSILNLRYESNHLIDLSRYASKINIGSKVNFDPIDKNQIQLFNLESSKIEVILKNAIVYNSMYENFSTSFWIRIPKYFNSISLNNEYTIINCMENNSGWKVSLNYGEIIWTLQDTQEIKQRVVFKYSQMINISDYINRWIFVTITNNRLNNSKIYINGRLIDQKPISNLGNIHASNNIMFKLDGCRDTHRYIWIKYFNLFDKELNEKEIKDLYDNQSNSGILKDFWGDYLQYDKPYYMLNLYDPNKYVDVNNVGIRGYMYLKGPRGSVMTTNIYLNSSLYRGTKFIIKKYASGNKDNIVRNNDRVYINVVVKNKEYRLATNASQAGVEKILSALEIPDVGNLSQVVVMKSKNDQGIKNKCKMNLQDNNGNDIGFIGFHQFNNIAKLVASNWYNRQIERSSRTLGCSWEFIPVDDGWGERPL

SEQ ID NO: 154 - protein, 424 aa, Artificial Sequence
  Synthetic
IINTSILNLRYESNHLIDLSRYASKINIGSKVNFDPIDKNQIQLFNLESSKIEVILKNAIVYNSMYENFSTSFWIRIPKYFNSISLNNEYTIINCMENNSGWKVSLNYGEIIWTLQDTQEIKQRVVFKYSQMINISDYINRWIFVTITNNRLNNSKIYINGRLIDQKPISNLGNIHASNNIMFKLDGCRDTHRYIWIKYFNLFDKELNEKEIKDLYDNQSNSGILKDFWGDYLQYDKPYYMLNLYDPNKYVDVNNVGIRGYMYLKGPRGSVMTTNIYLNSSLYRGTKFIIKKYASGNKDNIVRNNDRVYINVVVKNKEYRLATNASQAGVEKILSALEIPDVGNLSQVVVMKSKNDQGITNKCKMNLQDNNGNDIGFIGFHQFNNIAKLVASNWYNRQIGRSSRTLGCSWEFIPVDDGWGERPL

SEQ ID NO: 155 - protein, 424 aa, Artificial Sequence
  Synthetic
IINTSILNLRYESNHLIDLSRYASKINIGSKVNFDPIDKNQIQLFNLESSKIEVILKNAIVYNSMYENFSTSFWIRIPKYFNSISLNNEYTIINCMENNSGWKVSLNYGEIIWTLQDTQEIKQRVVFKYSQMINISDYINRWIFVTITNNRLNNSKIYINGRLIDQKPISNLGNIHASNNIMFKLDGCRDTHRYIWIKYFNLFDKELNEKEIKDLYDNQSNSGILKDFWGDYLQYDKPYYMLNLYDPNKYVDVNNVGIRGYMYLKGPRGSVMTTNIYLNSSLYRGTKFIIKKYASGNKDNIVRNNDRVYINVVVKNKEYRLATNASQAGVEKILSALEIPDVGNLSQVVVMKSKNDQGITNKCKMNLQDNNGNDIGFIGFHQFNNIAKLVASNWYNRQIERSSRTFGCSWEFIPVDDGWGERPL

SEQ ID NO: 156 - protein, 424 aa, Artificial Sequence
  Synthetic
IINTSILNLRYESNHLIDLSRYASKINIGSKVNFDPIDKNQIQLFNLESSKIEVILKNAIVYNSMYENFSTSFWIRIPKYFNSISLNNEYTIINCMENNSGWKVSLNYGEIIWTLQDTQEIKQRVVFKYSQMINISDYINRWIFVTITNNRLNNSKIYINGRLIDQKPISNLGNIHASNNIMFKLDGCRDTHRYIWIKYFNLFDKELNEKEIKDLYDNQSNSGILKDFWGDYLQYDKPYYMLNLYDPNKYVDVNNVGIRGYMYLKGPRGSVMTTNIYLNSSLYRGTKFIIKKYASGNKDNIVRNNDRVYINVVVKNKEYRLATNASQAGVEKILSALEIPDVGNLSQVVVMKSKNDQGITNKCKMNLQDNNGNDIGFIGFHQFNNIAKLVASNWYNRQIERSSRTYGCSWEFIPVDDGWGERPL

SEQ ID NO: 157 - protein, 424 aa, Artificial Sequence
  Synthetic
IINTSILNLRYESNHLIDLSRYASKINIGSKVNFDPIDKNQIQLFNLESSKIEVILKNAIVYNSMYENFSTSFWIRIPKYFNSISLNNEYTIINCMENNSGWKVSLNYGEIIWTLQDTQEIKQRVVFKYSQMINISDYINRWIFVTITNNRLNNSKIYINGRLIDQKPISNLGNIHASNNIMFKLDGCRDTHRYIWIKYFNLFDKELNEKEIKDLYDNQSNSGILKDFWGDYLQYDKPYYMLNLYDPNKYVDVNNVGIRGYMYLKGPRGSVMTTNIYLNSSLYRGTKFIIKKYASGNKDNIVRNNDRVYINVVVKNKEYRLATNASQAGVEKILSALEIPDVGNLSQVVVMKSKNDQGITNKCKMNLQDNNGNDIGFIGFHQFNNIAKLVASNWYNRQIERSSRTWGCSWEFIPVDDGWGERPL

SEQ ID NO: 158 - protein, 424 aa, Artificial Sequence
  Synthetic
IINTSILNLRYESNHLIDLSRYASKINIGSKVNFDPIDKNQIQLFNLESSKIEVILKNAIVYNSMYENFSTSFWIRIPKYFNSISLNNEYTIINCMENNSGWKVSLNYGEIIWTLQDTQEIKQRVVFKYSQMINISDYINRWIFVTITNNRLNNSKIYINGRLIDQKPISNLGNIHASNNIMFKLDGCRDTHRYIWIKYFNLFDKELNEKEIKDLYDNQSNSGILKDFWGDYLQYDKPYYMLNLYDPNKYVDVNNVGIRGYMYLKGPRGSVMTTNIYLNSSLYRGTKFIIKKYASGNKDNIVRNNDRVYINVVVKNKEYRLATNASQAGVEKILSALEIPDVGNLSQVVVMKSKNDQGITNKCKMNLQDNNGNDIGFIGFHQFNNIAKLVASNWYNRQIERSSRTLGCSWEFIPVEDGWGERPL

SEQ ID NO: 159 - protein, 424 aa, Artificial Sequence
  Synthetic
IINTSILNLRYESNHLIDLSRYASKINIGSKVNFDPIDKNQIQLFNLESSKIEVILKNAIVYNSMYENFSTSFWIRIPKYFNSISLNNEYTIINCMENNSGWKVSLNYGEIIWTLQDTQEIKQRVVFKYSQMINISDYINRWIFVTITNNRLNNSKIYINGRLIDQKPISNLGNIHASNNIMFKLDGCRDTHRYIWIKYFNLFDKELNEKEIKDLYDNQSNSGILKDFWGDYLQYDKPYYMLNLYDPNKYVDVNNVGIRGYMYLKGPRGSVMTTNIYLNSSLYRGTKFIIKKYASGNKDNIVRNNDRVYINVVVKNKEYRLATNASQAGVEKILSALEIPDVGNLSQVVVMKSKNDQGITNKCKMNLQDNNGNDIGFIGFHQFNNIAKLVASNWYNRQIERSSRTLGCSWEFIPVDYGWGERPL

SEQ ID NO: 160 - protein, 424 aa, Artificial Sequence
  Synthetic
IINTSILNLRYESNHLIDLSRYASKINIGSKVNFDPIDKNQIQLFNLESSKIEVILKNAIVYNSMYENFSTSFWIRIPKYFNSISLNNEYTIINCMENNSGWKVSLNYGEIIWTLQDTQEIKQRVVFKYSQMINISDYINRWIFVTITNNRLNNSKIYINGRLIDQKPISNLGNIHASNNIMFKLDGCRDTHRYIWIKYFNLFDKELNEKEIKDLYDNQSNSGILKDFWGDYLQYDKPYYMLNLYDPNKYVDVNNVGIRGYMYLKGPRGSVMTTNIYLNSSLYRGTKFIIKKYASGNKDNIVRNNDRVYINVVVKNKEYRLATNASQAGVEKILSALEIPDVGNLSQVVVMKSKNDQGITNKCKMNLQDNNGNDIGFIGFHQFNNIAKLVASNWYNRQIERSSRTLGCSWEFIPVDDGWRERPL

SEQ ID NO: 161 - protein, 424 aa, Artificial Sequence
  Synthetic
IINTSILNLRYESNHLIDLSRYASKINIGSKVNFDPIDKNQIQLFNLESSKIEVILKNAIVYNSMYENFSTSFWIRIPKYFNSISLNNEYTIINCMENNSGWKVSLNYGEIIWTLQDTQEIKQRVVFKYSQMINISDYINRWIFVTITNNRLNNSKIYINGRLIDQKPISNLGNIHASNNIMFKLDGCRDTHRYIWIKYFNLFDKELNEKEIKDLYDNQSNSGILKDFWGDYLQYDKPYYMLNLYDPNKYVDVNNVGIRGYMYLKGPRGSVMTTNIYLNSSLYRGTKFIIKKYASGNKDNIVRNNDRVYINVVVKNKEYRLATNASQAGVEKILSALEIPDVGNLSQVVVMKSKNDQGITNKCKMNLQDNNGNDIGFIGFHQFNNIAKLVASNWYNRQIERSSRTLGCSWEFIPVDDGWKERPL

SEQ ID NO: 162 - protein, 424 aa, Artificial Sequence
  Synthetic
IINTSILNLRYESNHLIDLSRYASKINIGSKVNFDPIDKNQIQLFNLESSKIEVILKNAIVYNSMYENFSTSFWIRIPKYFNSISLNNEYTIINCMENNSGWKVSLNYGEIIWTLQDTQEIKQRVVFKYSQMINISDYINRWIFVTITNNRLNNSKIYINGRLIDQKPISNLGNIHASNNIMFKLDGCRDTHRYIWIKYFNLFDKELNEKEIKDLYDNQSNSGILKDFWGDYLQYDKPYYMLNLYDPNKYVDVNNVGIRGYMYLKGPRGSVMTTNIYLNSSLYRGTKFIIKKYASGNKDNIVRNNDRVYINVVVKNKEYRLATNASQAGVEKILSALEIPDVGNLSQVVVMKSKNDQGITNKCKMNLQDNNGNDIGFIGFHQFNNIAKLVASNWYNRQIERSSRTLGCSWEFIPVDDGWGESPL

SEQ ID NO: 163 - protein, 424 aa, Artificial Sequence
  Synthetic
IINTSILNLRYESNHLIDLSRYASKINIGSKVNFDPIDKNQIQLFNLESSKIEVILKNAIVYNSMYENFSTSFWIRIPKYFNSISLNNEYTIINCMENNSGWKVSLNYGEIIWTLQDTQEIKQRVVFKYSQMINISDYINRWIFVTITNNRLNNSKIYINGRLIDQKPISNLGNIHASNNIMFKLDGCRDTHRYIWIKYFNLFDKELNEKEIKDLYDNQSNSGILKDFWGDYLQYDKPYYMLNLYDPNKYVDVNNVGIRGYMYLKGPRGSVMTTNIYLNSSLYRGTKFIIKKYASGNKDNIVRNNDRVYINVVVKNKEYRLATNASQAGVEKILSALEIPDVGNLSQVVVMKSKNDQGITNKCKMNLQDNNGNDIGFIGFHQFNNIAKLVASNWYNRQIERSSRTLGCSWEFIPVDDGWGETPL

SEQ ID NO: 164 - protein, 424 aa, Artificial Sequence
  Synthetic
IINTSILNLRYESNHLIDLSRYASKINIGSKVNFDPIDKNQIQLFNLESSKIEVILKNAIVYNSMYENFSTSFWIRIPKYFNSISLNNEYTIINCMENNSGWKVSLNYGEIIWTLQDTQEIKQRVVFKYSQMINISDYINRWIFVTITNNRLNNSKIYINGRLIDQKPISNLGNIHASNNIMFKLDGCRDTHRYIWIKYFNLFDKELNEKEIKDLYDNQSNSGILKDFWGDYLQYDKPYYMLNLYDPNKYVDVNNVGIRGYMYLKGPRGSVMTTNIYLNSSLYRGTKFIIKKYASGNKDNIVRNNDRVYINVVVKNKEYRLATNASQAGVEKILSALEIPDVGNLSQVVVMKSKNDQGITNKCKMNLQDNNGNDIGFIGFHQFNNIAKLVASNWYNRQIERSSRTLGCSWEFIPVDDGWGERSL

SEQ ID NO: 165 - protein, 424 aa, Artificial Sequence
  Synthetic
IINTSILNLRYESNHLIDLSRYASKINIGSKVNFDPIDKNQIQLFNLESSKIEVILKNAIVYNSMYENFSTSFWIRIPKYFNSISLNNEYTIINCMENNSGWKVSLNYGEIIWTLQDTQEIKQRVVFKYSQMINISDYINRWIFVTITNNRLNNSKIYINGRLIDQKPISNLGNIHASNNIMFKLDGCRDTHRYIWIKYFNLFDKELNEKEIKDLYDNQSNSGILKDFWGDYLQYDKPYYMLNLYDPNKYVDVNNVGIRGYMYLKGPRGSVMTTNIYLNSSLYRGTKFIIKKYASGNKDNIVRNNDRVYINVVVKNKEYRLATNASQAGVEKILSALEIPDVGNLSQVVVMKSKNDQGITNKCKMNLQDNNGNDIGFIGFHQFNNIAKLVASNWYNRQIERSSRTLGCSWEFIPVDDGWGERTL

SEQ ID NO: 166 - protein, 424 aa, Artificial Sequence
  Synthetic
IVNTSILSIVYKKDDLIDLSRYGAKINIGDRVYYDSIDKNQIQLINLESSTIEVILKNAIVYNSMYENFSTSFWIKIPKYFSKINLNNEYTIINCIENNSGWKVSLNYGEIIWTLQDNKQNIQRVVFKYSQMVNISDYINRWIFVTITNNRLTKSKIYINGRLIDQKPISNLGNIHASNKIMFKLDGCRDPRRYIMIKYFNLFDKELNEKEIKDLYDSQSNSGILKDFWGNYLQYDKPYYMLNLFDPNKYVDVNNIGIRGYMYLKGPRGSVVTTNIYLNSTLYEGTKFIIKKYASGNEDNIVRNNDRVYINVVVKNKEYRLATNASQAGVEKILSALEIPDVGNLSQVVVMKSKDDQGIRNKCKMNLQDNNGNDIGFIGFHLYDNIAKLVASNWYNRQVGKASRTFGCSWEFIPVDDGWGESSL

SEQ ID NO: 167 - protein, 424 aa, Artificial Sequence
  Synthetic
IVNTSILSIVYKKDDLIDLSRYGAKINIGDRVYYDSIDKNQIKLINLESSKIEVILKNAIVYNSMYENFSTSFWIKIPKYFSKINLNNEYTIINCIENNSGWKVSLNYGEIIWTLQDNKQNIQRVVFKYSQMVNISDYINRWIFVTITNNRLTKSKIYINGRLIDQKPISNLGNIHASNKIMFKLDGCRDPRRYIMIKYFNLFDKELNEKEIKDLYDSQSNSGILKDFWGNYLQYDKPYYMLNLFDPNKYVDVNNIGIRGYMYLKGPRGSVVTTNIYLNSTLYEGTKFIIKKYASGNEDNIVRNNDRVYINVVVKNKEYRLATNASQAGVEKILSALEIPDVGNLSQVVVMKSKDDQGIRNKCKMNLQDNNGNDIGFIGFHLYDNIAKLVASNWYNRQVGKASRTFGCSWEFIPVDDGWGESSL

SEQ ID NO: 168 - protein, 424 aa, Artificial Sequence
  Synthetic
IVNTSILSIVYKKDDLIDLSRYGAKINIGDRVYYDSIDKNQIKLINLESSTIEVILKNAIVYNSMYENFSTSFWIKIPKYFSKINLNNEYTIINCIENNSGWKVSLNYGEIIWTLQDNKQNIQRVVFKYSQMVNISDYINRWIFVTITNNRLTKSKIYINGRLIDQKPISNLGNIHASNKIMFKLDGCRDPRRYIMIKYFNLFDKELNEKEIKDLYDNQSNSGILKDFWGNYLQYDKPYYMLNLFDPNKYVDVNNIGIRGYMYLKGPRGSVVTTNIYLNSTLYEGTKFIIKKYASGNEDNIVRNNDRVYINVVVKNKEYRLATNASQAGVEKILSALEIPDVGNLSQVVVMKSKDDQGIRNKCKMNLQDNNGNDIGFIGFHLYDNIAKLVASNWYNRQVGKASRTFGCSWEFIPVDDGWGESSL

SEQ ID NO: 169 - protein, 424 aa, Artificial Sequence
  Synthetic
IVNTSILSIVYKKDDLIDLSRYGAKINIGDRVYYDSIDKNQIKLINLESSTIEVILKNAIVYNSMYENFSTSFWIKIPKYFSKINLNNEYTIINCIENNSGWKVSLNYGEIIWTLQDNKQNIQRVVFKYSQMVNISDYINRWIFVTITNNRLTKSKIYINGRLIDQKPISNLGNIHASNKIMFKLDGCRDPRRYIMIKYFNLFDKELNEKEIKDLYDSQSNSGILKDFWGDYLQYDKPYYMLNLFDPNKYVDVNNIGIRGYMYLKGPRGSVVTTNIYLNSTLYEGTKFIIKKYASGNEDNIVRNNDRVYINVVVKNKEYRLATNASQAGVEKILSALEIPDVGNLSQVVVMKSKDDQGIRNKCKMNLQDNNGNDIGFIGFHLYDNIAKLVASNWYNRQVGKASRTFGCSWEFIPVDDGWGESSL

SEQ ID NO: 170 - protein, 424 aa, Artificial Sequence
  Synthetic
IVNTSILSIVYKKDDLIDLSRYGAKINIGDRVYYDSIDKNQIKLINLESSTIEVILKNAIVYNSMYENFSTSFWIKIPKYFSKINLNNEYTIINCIENNSGWKVSLNYGEIIWTLQDNKQNIQRVVFKYSQMVNISDYINRWIFVTITNNRLTKSKIYINGRLIDQKPISNLGNIHASNKIMFKLDGCRDPRRYIMIKYFNLFDKELNEKEIKDLYDSQSNSGILKDFWGNYLQYDKPYYMLNLYDPNKYVDVNNIGIRGYMYLKGPRGSVVTTNIYLNSTLYEGTKFIIKKYASGNEDNIVRNNDRVYINVVVKNKEYRLATNASQAGVEKILSALEIPDVGNLSQVVVMKSKDDQGIRNKCKMNLQDNNGNDIGFIGFHLYDNIAKLVASNWYNRQVGKASRTFGCSWEFIPVDDGWGESSL

SEQ ID NO: 171 - protein, 424 aa, Artificial Sequence
  Synthetic
IVNTSILSIVYKKDDLIDLSRYGAKINIGDRVYYDSIDKNQIKLINLESSTIEVILKNAIVYNSMYENFSTSFWIKIPKYFSKINLNNEYTIINCIENNSGWKVSLNYGEIIWTLQDNKQNIQRVVFKYSQMVNISDYINRWIFVTITNNRLTKSKIYINGRLIDQKPISNLGNIHASNKIMFKLDGCRDPRRYIMIKYFNLFDKELNEKEIKDLYDSQSNSGILKDFWGNYLQYDKPYYMLNLFDPNKYVDVNNIGIRGYMYLKGPRGSVVTTNIYLNSTLYMGTKFIIKKYASGNEDNIVRNNDRVYINVVVKNKEYRLATNASQAGVEKILSALEIPDVGNLSQVVVMKSKDDQGIRNKCKMNLQDNNGNDIGFIGFHLYDNIAKLVASNWYNRQVGKASRTFGCSWEFIPVDDGWGESSL

SEQ ID NO: 172 - protein, 424 aa, Artificial Sequence
  Synthetic
IVNTSILSIVYKKDDLIDLSRYGAKINIGDRVYYDSIDKNQIKLINLESSTIEVILKNAIVYNSMYENFSTSFWIKIPKYFSKINLNNEYTIINCIENNSGWKVSLNYGEIIWTLQDNKQNIQRVVFKYSQMVNISDYINRWIFVTITNNRLTKSKIYINGRLIDQKPISNLGNIHASNKIMFKLDGCRDPRRYIMIKYFNLFDKELNEKEIKDLYDSQSNSGILKDFWGNYLQYDKPYYMLNLFDPNKYVDVNNIGIRGYMYLKGPRGSVVTTNIYLNSTLYEGTKFIIKKYASGNKDNIVRNNDRVYINVVVKNKEYRLATNASQAGVEKILSALEIPDVGNLSQVVVMKSKDDQGIRNKCKMNLQDNNGNDIGFIGFHLYDNIAKLVASNWYNRQVGKASRTFGCSWEFIPVDDGWGESSL

SEQ ID NO: 173 - protein, 424 aa, Artificial Sequence
  Synthetic
IVNTSILSIVYKKDDLIDLSRYGAKINIGDRVYYDSIDKNQIKLINLESSTIEVILKNAIVYNSMYENFSTSFWIKIPKYFSKINLNNEYTIINCIENNSGWKVSLNYGEIIWTLQDNKQNIQRVVFKYSQMVNISDYINRWIFVTITNNRLTKSKIYINGRLIDQKPISNLGNIHASNKIMFKLDGCRDPRRYIMIKYFNLFDKELNEKEIKDLYDSQSNSGILKDFWGNYLQYDKPYYMLNLFDPNKYVDVNNIGIRGYMYLKGPRGSVVTTNIYLNSTLYEGTKFIIKKYASGNEDNIVRNNDRVYINVVVKNKEYRLATNASQAGVEKILSALEIPDVGNLSQVVVMKSKNDQGIRNKCKMNLQDNNGNDIGFIGFHLYDNIAKLVASNWYNRQVGKASRTFGCSWEFIPVDDGWGESSL

SEQ ID NO: 174 - protein, 424 aa, Artificial Sequence
  Synthetic
IVNTSILSIVYKKDDLIDLSRYGAKINIGDRVYYDSIDKNQIKLINLESSTIEVILKNAIVYNSMYENFSTSFWIKIPKYFSKINLNNEYTIINCIENNSGWKVSLNYGEIIWTLQDNKQNIQRVVFKYSQMVNISDYINRWIFVTITNNRLTKSKIYINGRLIDQKPISNLGNIHASNKIMFKLDGCRDPRRYIMIKYFNLFDKELNEKEIKDLYDSQSNSGILKDFWGNYLQYDKPYYMLNLFDPNKYVDVNNIGIRGYMYLKGPRGSVVTTNIYLNSTLYEGTKFIIKKYASGNEDNIVRNNDRVYINVVVKNKEYRLATNASQAGVEKILSALEIPDVGNLSQVVVMKSKDDQGIRNKCKMNLQDNNGNDIGFIGFHQYDNIAKLVASNWYNRQVGKASRTFGCSWEFIPVDDGWGESSL

SEQ ID NO: 175 - protein, 424 aa, Artificial Sequence
  Synthetic
IVNTSILSIVYKKDDLIDLSRYGAKINIGDRVYYDSIDKNQIKLINLESSTIEVILKNAIVYNSMYENFSTSFWIKIPKYFSKINLNNEYTIINCIENNSGWKVSLNYGEIIWTLQDNKQNIQRVVFKYSQMVNISDYINRWIFVTITNNRLTKSKIYINGRLIDQKPISNLGNIHASNKIMFKLDGCRDPRRYIMIKYFNLFDKELNEKEIKDLYDSQSNSGILKDFWGNYLQYDKPYYMLNLFDPNKYVDVNNIGIRGYMYLKGPRGSVVTTNIYLNSTLYEGTKFIIKKYASGNEDNIVRNNDRVYINVVVKNKEYRLATNASQAGVEKILSALEIPDVGNLSQVVVMKSKDDQGIRNKCKMNLQDNNGNDIGFIGFHLFDNIAKLVASNWYNRQVGKASRTFGCSWEFIPVDDGWGESSL

SEQ ID NO: 176 - protein, 424 aa, Artificial Sequence
  Synthetic
IVNTSILSIVYKKDDLIDLSRYGAKINIGDRVYYDSIDKNQIKLINLESSTIEVILKNAIVYNSMYENFSTSFWIKIPKYFSKINLNNEYTIINCIENNSGWKVSLNYGEIIWTLQDNKQNIQRVVFKYSQMVNISDYINRWIFVTITNNRLTKSKIYINGRLIDQKPISNLGNIHASNKIMFKLDGCRDPRRYIMIKYFNLFDKELNEKEIKDLYDSQSNSGILKDFWGNYLQYDKPYYMLNLFDPNKYVDVNNIGIRGYMYLKGPRGSVVTTNIYLNSTLYEGTKFIIKKYASGNEDNIVRNNDRVYINVVVKNKEYRLATNASQAGVEKILSALEIPDVGNLSQVVVMKSKDDQGIRNKCKMNLQDNNGNDIGFIGFHLYNNIAKLVASNWYNRQVGKASRTFGCSWEFIPVDDGWGESSL

SEQ ID NO: 177 - protein, 1296 aa, Artificial Sequence
  Synthetic
MPFVNKQFNYRDPVNGVDIAYIKIPNAGQMQPVKAFKIHNKIWVIPERDTFTNPEEGDLNPPPEAKQVPVSYYDSTYLSTDNEKDNYLKGVTKLFERIYSTDLGRMLLTSIVRGIPFWGGSTIDTELKVIDTNCINVIQPDGSYRSEELNLVIIGPSADIIQFECKSFGHEVLNLTRNGYGSTQYIRFSPDFTFGFEESLEVDTNPLLGAGKFATDPAVTLAHELIHAGHRLYGIAINPNRVFKVNTNAYYEMSGLEVSFEELRTFGGHDAKFIDSLQENEFRLYYYNRFRDIASTLNRAKSIVGTTASLQYMKNVFKEKYLLSEDTSGKFSVDRLRFDKLYRMLTEIYTEDNFVKFFKVLNRKTYLNFDKAVFRINIVPRVNYTIYDGFNLRNTNLAANFNGQNTEINNMNFTRLKNFTGLFEFYKLLCVRGIITSKTKSLDKGYNKALNDLCIKVNNWDLFFSPSEDNFTNDLNKGEEITSDTNIEAAEENISLDLIQQYYLTFNFDNEPENISIENLSSDIIGQLELMPNIERFPNGKKYELDKYTMFHYLRAQEFEHGKSRIALTNSVNEALLNPSRVYTFFSSDYVKKVNKATEAAMFLGWVEQLVYDFTDETSEVSTTDKIADITIIIPYIGPALNIGNMLYKDDFVGALIFSGAVILLEFIPEIAIPVLGTFALVSYIANKVLTVQTIDNALSKRNEKWDEVYKYIVTNWLAKVNTQIDLIRKKMKETLENQAEATKAIINYQYNQYTEEEKNNINFNIDDLSSKLNESINKAMININKFLNQCSVSYLMNSMIPYGVKRLEDFDASLKDALLKYIYDNRGTLIGQVDRLKDKVNNTLSTDIPFQLSKYVDNQRLLSTFTEYIKNIINTSILNLRYESNHLIDLSRYASKINIGSKVNFDPIDKNQIQLFNLESSKIEVILKNAIVYNSMYENFSTSFWIRIPKYFNSISLNNEYTIINCMENNSGWKVSLNYGEIIWTLQDTQEIKQRVVFKYSQMINISDYINRWIFVTITNNRLNNSKIYINGRLIDQKPISNLGNIHASNNIMFKLDGCRDTHRYIWIKYFNLFDKELNEKEIKDLYDNQSNSGILKDFWGDYLQYDKPYYMLNLYDPNKYVDVNNVGIRGYMYLKGPRGSVMTTNIYLNSSLYMGTKFIIKKYASGNKDNIVRNNDRVYINVVVKNKEYRLATNASQAGVEKILSALEIPDVGNLSQVVVMKSKNDQGITNKCKMNLQDNNGNDIGFIGFHQFNNIAKLVASNWYNRQIERSSRTLGCSWEFIPVDDGWGERPL

SEQ ID NO: 178 - protein, 1296 aa, Artificial Sequence
  Synthetic
MPFVNKQFNYRDPVNGVDIAYIKIPNAGQMQPVKAFKIHNKIWVIPERDTFTNPEEGDLNPPPEAKQVPVSYYDSTYLSTDNEKDNYLKGVTKLFERIYSTDLGRMLLTSIVRGIPFWGGSTIDTELKVIDTNCINVIQPDGSYRSEELNLVIIGPSADIIQFECKSFGHEVLNLTRNGYGSTQYIRFSPDFTFGFEESLEVDTNPLLGAGKFATDPAVTLAHELIHAGHRLYGIAINPNRVFKVNTNAYYEMSGLEVSFEELRTFGGHDAKFIDSLQENEFRLYYYNRFRDIASTLNRAKSIVGTTASLQYMKNVFKEKYLLSEDTSGKFSVDRLRFDKLYRMLTEIYTEDNFVKFFKVLNRKTYLNFDKAVFRINIVPRVNYTIYDGFNLRNTNLAANFNGQNTEINNMNFTRLKNFTGLFEFYKLLCVRGIITSKTKSLDKGYNKALNDLCIKVNNWDLFFSPSEDNFTNDLNKGEEITSDTNIEAAEENISLDLIQQYYLTFNFDNEPENISIENLSSDIIGQLELMPNIERFPNGKKYELDKYTMFHYLRAQEFEHGKSRIALTNSVNEALLNPSRVYTFFSSDYVKKVNKATEAAMFLGWVEQLVYDFTDETSEVSTTDKIADITIIIPYIGPALNIGNMLYKDDFVGALIFSGAVILLEFIPEIAIPVLGTFALVSYIANKVLTVQTIDNALSKRNEKWDEVYKYIVTNWLAKVNTQIDLIRKKMKETLENQAEATKAIINYQYNQYTEEEKNNINFNIDDLSSKLNESINKAMININKFLNQCSVSYLMNSMIPYGVKRLEDFDASLKDALLKYIYDNRGTLIGQVDRLKDKVNNTLSTDIPFQLSKYVDNQRLLSTFTEYIKNIINTSILNLRYESNHLIDLSRYASKINIGSKVNFDPIDKNQIQLFNLESSKIEVILKNAIVYNSMYENFSTSFWIRIPKYFNSISLNNEYTIINCMENNSGWKVSLNYGEIIWTLQDTQEIKQRVVFKYSQMINISDYINRWIFVTITNNRLNNSKIYINGRLIDQKPISNLGNIHASNNIMFKLDGCRDTHRYIWIKYFNLFDKELNEKEIKDLYDNQSNSGILKDFWGDYLQYDKPYYMLNLYDPNKYVDVNNVGIRGYMYLKGPRGSVMTTNIYLNSSLYRGTKFIIKKYASGNKDNIVRNNDRVYINVVVKNKEYRLATNASQAGVEKILSALEIPDVGNLSQVVVMKSKNDQGIRNKCKMNLQDNNGNDIGFIGFHQFNNIAKLVASNWYNRQIERSSRTLGCSWEFIPVDDGWGERPL

SEQ ID NO: 179 - protein, 434 aa, Artificial Sequence
  Synthetic
SEILNNIILNLRYRDNNLIDLSGYGAKVEVYDGVKLNDKNQFKLTSSADSKIRVTQNQNIIFNSMFLDFSVSFWIRIPKYRNDDIQNYIHNEYTIINCMKNNSGWKISIRGNRIIWTLIDINGKTKSVFFEYNIREDISEYINRWFFVTITNNLDNAKIYINGTLESNMDIKDIGEVIVNGEITFKLDGDVDRTQFIWMKYFSIFNTQLNQSNIKEIYKIQSYSEYLKDFWGNPLMYNKEYYMFNAGNKNSYIKLVKDSSVGEILIRSKYNQNSNYINYRNLYIGEKFIIRRESNSQSINDDIVRKEDYIHLDLVLHHEEWRVYAYKYFKEQEEKLFLSIISDSNEFYKTIEIKEYDEQPSYSCQLLFKKDEESTDDIGLIGIHRFYESGVLRKKYKDYFCISKWYLKEVKRKPYKSNLGCNWQFIPKDEGWTE

SEQ ID NO: 180 - protein, 421 aa, Artificial Sequence
  Synthetic
SKILSLQNRKNTLVDTSGYNAEVSEEGDVQLNPIFPFDFKLGSSGEDRGKVIVTQNENIVYNSMYESFSISFWIRINKWVSNLPGYTIIDSVKNNSGWSIGIISNFLVFTLKQNEDSEQSINFSYDISNNAPGYNKWFFVTVTNNMMGNMKIYINGKLIDTIKVKELTGINFSKTITFEINKIPDTGLITSDSDNINMWIRDFYIFAKELDGKDINILFNSLQYTNVVKDYWGNDLRYNKEYYMVNIDYLNRYMYANSRQIVFNTRRNNNDFNEGYKIIIKRIRGNTNDTRVRGGDILYFDMTINNKAYNLFMKNETMYADNHSTEDIYAIGLREQTKDINDNIIFQIQPMNNTYYYASQIFKSNFNGENISGICSIGTYRFRLGGDWYRHNYLVPTVKQGNYASLLESTSTHWGFVPVSE

SEQ ID NO: 181 - protein, 414 aa, Artificial Sequence
  Synthetic
SINDSKILSLQNKKNALVDTSGYNAEVRVGDNVQLNTIYTNDFKLSSSGDKIIVNLNNNILYSAIYENSSVSFWIKISKDLTNSHNEYTIINSIEQNSGWKLCIRNGNIEWILQDVNRKYKSLIFDYSESLSHTGYTNKWFFVTITNNIMGYMKLYINGELKQSQKIEDLDEVKLDKTIVFGIDENIDENQMLWIRDFNIFSKELSNEDINIVYEGQILRNVIKDYWGNPLKFDTEYYIINDNYIDRYIAPESNVLVLVQYPDRSKLYTGNPITIKSVSDKNPYSRILNGDNIILHMLYNSRKYMIIRDTDTIYATQGGECSQNCVYALKLQSNLGNYGIGIFSIKNIVSKNKYCSQIFSSFRENTMLLADIYKPWRFSFKNAYTPVAVTNYETKLLSTSSFWKFISRDPGWVE

SEQ ID NO: 182 - protein, 408 aa, Artificial Sequence
  Synthetic
KRIKSSSVLNMRYKNDKYVDTSGYDSNININGDVYKYPTNKNQFGIYNDKLSEVNISQNDYIIYDNKYKNFSISFWVRIPNYDNKIVNVNNEYTIINCMRDNNSGWKVSLNHNEIIWTLQDNAGINQKLAFNYGNANGISDYINKWIFVTITNDRLGDSKLYINGNLIDQKSILNLGNIHVSDNILFKIVNCSYTRYIGIRYFNIFDKELDETEIQTLYSNEPNTNILKDFWGNYLLYDKEYYLLNVLKPNNFIDRRKDSTLSINNIRSTILLANRLYSGIKVKIQRVNNSSTNDNLVRKNDQVYINFVASKTHLFPLYADTATTNKEKTIKISSSGNRFNQVVVMNSVGNNCTMNFKNNNGNNIGLLGFKADTVVASTWYYTHMRDHTNSNGCFWNFISEEHGWQEK

SEQ ID NO: 183 - protein, 415 aa, Artificial Sequence
  Synthetic
KKIKDNSILDMRYENNKFIDISGYGSNISINGDVYIYSTNRNQFGIYSSKPSEVNIAQNNDIIYNGRYQNFSISFWVRIPKYFNKVNLNNEYTIIDCIRNNNSGWKISLNYNKIIWTLQDTAGNNQKLVFNYTQMISISDYINKWIFVTITNNRLGNSRIYINGNLIDEKSISNLGDIHVSDNILFKIVGCNDTRYVGIRYFKVFDTELGKTEIETLYSDEPDPSILKDFWGNYLLYNKRYYLLNLLRTDKSITQNSNFLNINQQRGVYQKPNIFSNTRLYTGVEVIIRKNGSTDISNTDNFVRKNDLAYINVVDRDVEYRLYADISIAKPEKIIKLIRTSNSNNSLGQIIVMDSIGNNCTMNFQNNNGGNIGLLGFHSNNLVASSWYYNNIRKNTSSNGCFWSFISKEHGWQEN

SEQ ID NO: 184 - protein, 435 aa, Artificial Sequence
  Synthetic
SNISSNAILSLSYRGGRLIDSSGYGATMNVGSDVIFNDIGNGQFKLNNSENSNITAHQSKFVVYDSMFDNFSINFWVRTPKYNNNDIQTYLQNEYTIISCIKNDSGWKVSIKGNRIIWTLIDVNAKSKSIFFEYSIKDNISDYINKWFSITITNDRLGNANIYINGSLKKSEKILNLDRINSSNDIDFKLINCTDTTKFVWIKDFNIFGRELNATEVSSLYWIQSSTNTLKDFWGNPLRYDTQYYLFNQGMQNIYIKYFSKASMGETAPRTNFNNAAINYQNLYLGLRFIIKKASNSRNINNDNIVREGDYIYLNIDNISDESYRVYVLVNSKEIQTQLFLAPINDDPTFYDVLQIKKYYEKTTYNCQILCEKDTKTFGLFGIGKFVKDYGYVWDTYDNYFCISQWYLRRISENINKLRLGCNWQFIPVDEGWTE

SEQ ID NO: 185 - protein, 430 aa, Artificial Sequence
  Synthetic
GELKYNCILNIKYEMDRDKLVDSSGYRSRINIGTGVKFSEIDKNQVQLSNLESSKIEVILNNGVIYNSMYENFSTSFWIRIPKYFRNINNEYKIISCMQNNSGWEVSLNFSNMNSKIIWTLQDTEGIKKTVVFQYTQNINISDYINRWIFVTITNNRLSNSKIYINGRLINEESISDLGNIHASNNIMFKLDGCRDPHRYIWIKYFNLFDKELNKKEIKDLYDNQSNSGILKDFWGDYLQYDKPYYMLNLYDPNKYLDVNNVGIRGYMYLKGPRGRIVTTNIYLNSTLYMGTKFIIKKYASGNKDNIVRNNDRVYINVVVKNKEYRLATNASQAGVEKILSAVEIPDVGNLSQVVVMKSENDQGIRNKCKMNLQDNNGNDIGFIGFHQFNNIAKLVASNWYNRQIGKASRTFGCSWEFIPVDDGWGESSL

SEQ ID NO: 186 - protein, 405 aa, Artificial Sequence
  Synthetic
GKIQDLSGENTPLTLGENLHIVNGRDNQAVRLNNQLDSKLEIQSRPNIHFTAFEDFSISIWIRCSMLRNNRNRGQKYTIIQQFNKYGWQLAIQDSVFVWTLHDTFNNQIQLTSGSALTNKNYLLQNFWLHITVTNKRSEKSRLYINGVLQDQKDISVLGNCHPKEPILFSIQDNSDPNYFVRFEQFNVYRKALTDSEVNRLYWKYFEGSYLRDVWGERLTYNRDYYMQLSTLPGRGIKREYRTWSGFDYIILSELGTQKIPTHEVTYPKLYQGQKITIHSDGKNLEPHVKSNKNIRLKIDDFYIGVVNPFKLPEWRPESGAYVVTTYNHAEDLCLYFRTRSSSQSLYYGQLIMNDGRNKSLLNYTLKGSTYWIWSSAWYYENYNTSSKTAGNWYFIPVDEGWKED

SEQ ID NO: 187 - protein, 1290 aa, Artificial Sequence
  Synthetic
SLDKGYNKALNDLCIKVNNWDLFFSPSEDNFTNDLNKGEEITSDTNIEAAEENISLDLIQQYYLTFNFDNEPENISIENLSSDIIGQLELMPNIERFPNGKKYELDKYTMFHYLRAQEFEHGKSRIALTNSVNEALLNPSRVYTFFSSDYVKKVNKATEAAMFLGWVEQLVYDFTDETSEVSTTDKIADITIIIPYIGPALNIGNMLYKDDFVGALIFSGAVILLEFIPEIAIPVLGTFALVSYIANKVLTVQTIDNALSKRNEKWDEVYKYIVTNWLAKVNTQIDLIRKKMKETLENQAEATKAIINYQYNQYTEEEKNNINFNIDDLSSKLNESINKAMININKFLNQCSVSYLMNSMIPYGVKRLEDFDASLKDALLKYIYDNRGTLIGQVDRLKDKVNNTLSTDIPFQLSKYVDNQRLLSTFTEYIKNIINTSILNLRYESNHLIDLSRYASKINIGSKVNFDPIDKNQIQLFNLESSKIEVILKNAIVYNSMYENFSTSFWIRIPKYFNSISLNNEYTIINCMENNSGWKVSLNYGEIIWTLQDTQEIKQRVVFKYSQMINISDYINRWIFVTITNNRLNNSKIYINGRLIDQKPISNLGNIHASNNIMFKLDGCRDTHRYIWIKYFNLFDKELNEKEIKDLYDNQSNSGILKDFWGDYLQYDKPYYMLNLYDPNKYVDVNNVGIRGYMYLKGPRGSVMTTNIYLNSSLYRGTKFIIKKYASGNKDNIVRNNDRVYINVVVKNKEYRLATNASQAGVEKILSALEIPDVGNLSQVVVMKSKNDQGITNKCKMNLQDNNGNDIGFIGFHQFNNIAKLVASNWYNRQIERSSRTLGCSWEFIPVDDGWGERPLSEILNNIILNLRYRDNNLIDLSGYGAKVEVYDGVKLNDKNQFKLTSSADSKIRVTQNQNIIFNSMFLDFSVSFWIRIPKYRNDDIQNYIHNEYTIINCMKNNSGWKISIRGNRIIWTLIDINGKTKSVFFEYNIREDISEYINRWFFVTITNNLDNAKIYINGTLESNMDIKDIGEVIVNGEITFKLDGDVDRTQFIWMKYFSIFNTQLNQSNIKEIYKIQSYSEYLKDFWGNPLMYNKEYYMFNAGNKNSYIKLVKDSSVGEILIRSKYNQNSNYINYRNLYIGEKFIIRRESNSQSINDDIVRKEDYIHLDLVLHHEEWRVYAYKYFKEQEEKLFLSIISDSNEFYKTIEIKEYDEQPSYSCQLLFKKDEESTDDIGLIGIHRFYESGVLRKKYKDYFCISKWYLKEVKRKPYKSNLGCNWQFIPKDEGWTE

SEQ ID NO: 188 - protein, 1277 aa, Artificial Sequence
  Synthetic
SLDKGYNKALNDLCIKVNNWDLFFSPSEDNFTNDLNKGEEITSDTNIEAAEENISLDLIQQYYLTFNFDNEPENISIENLSSDIIGQLELMPNIERFPNGKKYELDKYTMFHYLRAQEFEHGKSRIALTNSVNEALLNPSRVYTFFSSDYVKKVNKATEAAMFLGWVEQLVYDFTDETSEVSTTDKIADITIIIPYIGPALNIGNMLYKDDFVGALIFSGAVILLEFIPEIAIPVLGTFALVSYIANKVLTVQTIDNALSKRNEKWDEVYKYIVTNWLAKVNTQIDLIRKKMKETLENQAEATKAIINYQYNQYTEEEKNNINFNIDDLSSKLNESINKAMININKFLNQCSVSYLMNSMIPYGVKRLEDFDASLKDALLKYIYDNRGTLIGQVDRLKDKVNNTLSTDIPFQLSKYVDNQRLLSTFTEYIKNIINTSILNLRYESNHLIDLSRYASKINIGSKVNFDPIDKNQIQLFNLESSKIEVILKNAIVYNSMYENFSTSFWIRIPKYFNSISLNNEYTIINCMENNSGWKVSLNYGEIIWTLQDTQEIKQRVVFKYSQMINISDYINRWIFVTITNNRLNNSKIYINGRLIDQKPISNLGNIHASNNIMFKLDGCRDTHRYIWIKYFNLFDKELNEKEIKDLYDNQSNSGILKDFWGDYLQYDKPYYMLNLYDPNKYVDVNNVGIRGYMYLKGPRGSVMTTNIYLNSSLYRGTKFIIKKYASGNKDNIVRNNDRVYINVVVKNKEYRLATNASQAGVEKILSALEIPDVGNLSQVVVMKSKNDQGITNKCKMNLQDNNGNDIGFIGFHQFNNIAKLVASNWYNRQIERSSRTLGCSWEFIPVDDGWGERPLSKILSLQNRKNTLVDTSGYNAEVSEEGDVQLNPIFPFDFKLGSSGEDRGKVIVTQNENIVYNSMYESFSISFWIRINKWVSNLPGYTIIDSVKNNSGWSIGIISNFLVFTLKQNEDSEQSINFSYDISNNAPGYNKWFFVTVTNNMMGNMKIYINGKLIDTIKVKELTGINFSKTITFEINKIPDTGLITSDSDNINMWIRDFYIFAKELDGKDINILFNSLQYTNVVKDYWGNDLRYNKEYYMVNIDYLNRYMYANSRQIVFNTRRNNNDFNEGYKIIIKRIRGNTNDTRVRGGDILYFDMTINNKAYNLFMKNETMYADNHSTEDIYAIGLREQTKDINDNIIFQIQPMNNTYYYASQIFKSNFNGENISGICSIGTYRFRLGGDWYRHNYLVPTVKQGNYASLLESTSTHWGFVPVSE

SEQ ID NO: 189 - protein, 1270 aa, Artificial Sequence
  Synthetic
SLDKGYNKALNDLCIKVNNWDLFFSPSEDNFTNDLNKGEEITSDTNIEAAEENISLDLIQQYYLTFNFDNEPENISIENLSSDIIGQLELMPNIERFPNGKKYELDKYTMFHYLRAQEFEHGKSRIALTNSVNEALLNPSRVYTFFSSDYVKKVNKATEAAMFLGWVEQLVYDFTDETSEVSTTDKIADITIIIPYIGPALNIGNMLYKDDFVGALIFSGAVILLEFIPEIAIPVLGTFALVSYIANKVLTVQTIDNALSKRNEKWDEVYKYIVTNWLAKVNTQIDLIRKKMKETLENQAEATKAIINYQYNQYTEEEKNNINFNIDDLSSKLNESINKAMININKFLNQCSVSYLMNSMIPYGVKRLEDFDASLKDALLKYIYDNRGTLIGQVDRLKDKVNNTLSTDIPFQLSKYVDNQRLLSTFTEYIKNIINTSILNLRYESNHLIDLSRYASKINIGSKVNFDPIDKNQIQLFNLESSKIEVILKNAIVYNSMYENFSTSFWIRIPKYFNSISLNNEYTIINCMENNSGWKVSLNYGEIIWTLQDTQEIKQRVVFKYSQMINISDYINRWIFVTITNNRLNNSKIYINGRLIDQKPISNLGNIHASNNIMFKLDGCRDTHRYIWIKYFNLFDKELNEKEIKDLYDNQSNSGILKDFWGDYLQYDKPYYMLNLYDPNKYVDVNNVGIRGYMYLKGPRGSVMTTNIYLNSSLYRGTKFIIKKYASGNKDNIVRNNDRVYINVVVKNKEYRLATNASQAGVEKILSALEIPDVGNLSQVVVMKSKNDQGITNKCKMNLQDNNGNDIGFIGFHQFNNIAKLVASNWYNRQIERSSRTLGCSWEFIPVDDGWGERPLSINDSKILSLQNKKNALVDTSGYNAEVRVGDNVQLNTIYTNDFKLSSSGDKIIVNLNNNILYSAIYENSSVSFWIKISKDLTNSHNEYTIINSIEQNSGWKLCIRNGNIEWILQDVNRKYKSLIFDYSESLSHTGYTNKWFFVTITNNIMGYMKLYINGELKQSQKIEDLDEVKLDKTIVFGIDENIDENQMLWIRDFNIFSKELSNEDINIVYEGQILRNVIKDYWGNPLKFDTEYYIINDNYIDRYIAPESNVLVLVQYPDRSKLYTGNPITIKSVSDKNPYSRILNGDNIILHMLYNSRKYMIIRDTDTIYATQGGECSQNCVYALKLQSNLGNYGIGIFSIKNIVSKNKYCSQIFSSFRENTMLLADIYKPWRFSFKNAYTPVAVTNYETKLLSTSSFWKFISRDPGWVE

SEQ ID NO: 190 - protein, 1264 aa, Artificial Sequence
  Synthetic
SLDKGYNKALNDLCIKVNNWDLFFSPSEDNFTNDLNKGEEITSDTNIEAAEENISLDLIQQYYLTFNFDNEPENISIENLSSDIIGQLELMPNIERFPNGKKYELDKYTMFHYLRAQEFEHGKSRIALTNSVNEALLNPSRVYTFFSSDYVKKVNKATEAAMFLGWVEQLVYDFTDETSEVSTTDKIADITIIIPYIGPALNIGNMLYKDDFVGALIFSGAVILLEFIPEIAIPVLGTFALVSYIANKVLTVQTIDNALSKRNEKWDEVYKYIVTNWLAKVNTQIDLIRKKMKETLENQAEATKAIINYQYNQYTEEEKNNINFNIDDLSSKLNESINKAMININKFLNQCSVSYLMNSMIPYGVKRLEDFDASLKDALLKYIYDNRGTLIGQVDRLKDKVNNTLSTDIPFQLSKYVDNQRLLSTFTEYIKNIINTSILNLRYESNHLIDLSRYASKINIGSKVNFDPIDKNQIQLFNLESSKIEVILKNAIVYNSMYENFSTSFWIRIPKYFNSISLNNEYTIINCMENNSGWKVSLNYGEIIWTLQDTQEIKQRVVFKYSQMINISDYINRWIFVTITNNRLNNSKIYINGRLIDQKPISNLGNIHASNNIMFKLDGCRDTHRYIWIKYFNLFDKELNEKEIKDLYDNQSNSGILKDFWGDYLQYDKPYYMLNLYDPNKYVDVNNVGIRGYMYLKGPRGSVMTTNIYLNSSLYRGTKFIIKKYASGNKDNIVRNNDRVYINVVVKNKEYRLATNASQAGVEKILSALEIPDVGNLSQVVVMKSKNDQGITNKCKMNLQDNNGNDIGFIGFHQFNNIAKLVASNWYNRQIERSSRTLGCSWEFIPVDDGWGERPLKRIKSSSVLNMRYKNDKYVDTSGYDSNININGDVYKYPTNKNQFGIYNDKLSEVNISQNDYIIYDNKYKNFSISFWVRIPNYDNKIVNVNNEYTIINCMRDNNSGWKVSLNHNEIIWTLQDNAGINQKLAFNYGNANGISDYINKWIFVTITNDRLGDSKLYINGNLIDQKSILNLGNIHVSDNILFKIVNCSYTRYIGIRYFNIFDKELDETEIQTLYSNEPNTNILKDFWGNYLLYDKEYYLLNVLKPNNFIDRRKDSTLSINNIRSTILLANRLYSGIKVKIQRVNNSSTNDNLVRKNDQVYINFVASKTHLFPLYADTATTNKEKTIKISSSGNRFNQVVVMNSVGNNCTMNFKNNNGNNIGLLGFKADTVVASTWYYTHMRDHTNSNGCFWNFISEEHGWQEK

SEQ ID NO: 191 - protein, 1271 aa, Artificial Sequence
  Synthetic
SLDKGYNKALNDLCIKVNNWDLFFSPSEDNFTNDLNKGEEITSDTNIEAAEENISLDLIQQYYLTFNFDNEPENISIENLSSDIIGQLELMPNIERFPNGKKYELDKYTMFHYLRAQEFEHGKSRIALTNSVNEALLNPSRVYTFFSSDYVKKVNKATEAAMFLGWVEQLVYDFTDETSEVSTTDKIADITIIIPYIGPALNIGNMLYKDDFVGALIFSGAVILLEFIPEIAIPVLGTFALVSYIANKVLTVQTIDNALSKRNEKWDEVYKYIVTNWLAKVNTQIDLIRKKMKETLENQAEATKAIINYQYNQYTEEEKNNINFNIDDLSSKLNESINKAMININKFLNQCSVSYLMNSMIPYGVKRLEDFDASLKDALLKYIYDNRGTLIGQVDRLKDKVNNTLSTDIPFQLSKYVDNQRLLSTFTEYIKNIINTSILNLRYESNHLIDLSRYASKINIGSKVNFDPIDKNQIQLFNLESSKIEVILKNAIVYNSMYENFSTSFWIRIPKYFNSISLNNEYTIINCMENNSGWKVSLNYGEIIWTLQDTQEIKQRVVFKYSQMINISDYINRWIFVTITNNRLNNSKIYINGRLIDQKPISNLGNIHASNNIMFKLDGCRDTHRYIWIKYFNLFDKELNEKEIKDLYDNQSNSGILKDFWGDYLQYDKPYYMLNLYDPNKYVDVNNVGIRGYMYLKGPRGSVMTTNIYLNSSLYRGTKFIIKKYASGNKDNIVRNNDRVYINVVVKNKEYRLATNASQAGVEKILSALEIPDVGNLSQVVVMKSKNDQGITNKCKMNLQDNNGNDIGFIGFHQFNNIAKLVASNWYNRQIERSSRTLGCSWEFIPVDDGWGERPLKKIKDNSILDMRYENNKFIDISGYGSNISINGDVYIYSTNRNQFGIYSSKPSEVNIAQNNDIIYNGRYQNFSISFWVRIPKYFNKVNLNNEYTIIDCIRNNNSGWKISLNYNKIIWTLQDTAGNNQKLVFNYTQMISISDYINKWIFVTITNNRLGNSRIYINGNLIDEKSISNLGDIHVSDNILFKIVGCNDTRYVGIRYFKVFDTELGKTEIETLYSDEPDPSILKDFWGNYLLYNKRYYLLNLLRTDKSITQNSNFLNINQQRGVYQKPNIFSNTRLYTGVEVIIRKNGSTDISNTDNFVRKNDLAYINVVDRDVEYRLYADISIAKPEKIIKLIRTSNSNNSLGQIIVMDSIGNNCTMNFQNNNGGNIGLLGFHSNNLVASSWYYNNIRKNTSSNGCFWSFISKEHGWQEN

SEQ ID NO: 192 - protein, 1291 aa, Artificial Sequence
  Synthetic
SLDKGYNKALNDLCIKVNNWDLFFSPSEDNFTNDLNKGEEITSDTNIEAAEENISLDLIQQYYLTFNFDNEPENISIENLSSDIIGQLELMPNIERFPNGKKYELDKYTMFHYLRAQEFEHGKSRIALTNSVNEALLNPSRVYTFFSSDYVKKVNKATEAAMFLGWVEQLVYDFTDETSEVSTTDKIADITIIIPYIGPALNIGNMLYKDDFVGALIFSGAVILLEFIPEIAIPVLGTFALVSYIANKVLTVQTIDNALSKRNEKWDEVYKYIVTNWLAKVNTQIDLIRKKMKETLENQAEATKAIINYQYNQYTEEEKNNINFNIDDLSSKLNESINKAMININKFLNQCSVSYLMNSMIPYGVKRLEDFDASLKDALLKYIYDNRGTLIGQVDRLKDKVNNTLSTDIPFQLSKYVDNQRLLSTFTEYIKNIINTSILNLRYESNHLIDLSRYASKINIGSKVNFDPIDKNQIQLFNLESSKIEVILKNAIVYNSMYENFSTSFWIRIPKYFNSISLNNEYTIINCMENNSGWKVSLNYGEIIWTLQDTQEIKQRVVFKYSQMINISDYINRWIFVTITNNRLNNSKIYINGRLIDQKPISNLGNIHASNNIMFKLDGCRDTHRYIWIKYFNLFDKELNEKEIKDLYDNQSNSGILKDFWGDYLQYDKPYYMLNLYDPNKYVDVNNVGIRGYMYLKGPRGSVMTTNIYLNSSLYRGTKFIIKKYASGNKDNIVRNNDRVYINVVVKNKEYRLATNASQAGVEKILSALEIPDVGNLSQVVVMKSKNDQGITNKCKMNLQDNNGNDIGFIGFHQFNNIAKLVASNWYNRQIERSSRTLGCSWEFIPVDDGWGERPLSNISSNAILSLSYRGGRLIDSSGYGATMNVGSDVIFNDIGNGQFKLNNSENSNITAHQSKFVVYDSMFDNFSINFWVRTPKYNNNDIQTYLQNEYTIISCIKNDSGWKVSIKGNRIIWTLIDVNAKSKSIFFEYSIKDNISDYINKWFSITITNDRLGNANIYINGSLKKSEKILNLDRINSSNDIDFKLINCTDTTKFVWIKDFNIFGRELNATEVSSLYWIQSSTNTLKDFWGNPLRYDTQYYLFNQGMQNIYIKYFSKASMGETAPRTNFNNAAINYQNLYLGLRFIIKKASNSRNINNDNIVREGDYIYLNIDNISDESYRVYVLVNSKEIQTQLFLAPINDDPTFYDVLQIKKYYEKTTYNCQILCEKDTKTFGLFGIGKFVKDYGYVWDTYDNYFCISQWYLRRISENINKLRLGCNWQFIPVDEGWTE

SEQ ID NO: 193 - protein, 1286 aa, Artificial Sequence
  Synthetic
SLDKGYNKALNDLCIKVNNWDLFFSPSEDNFTNDLNKGEEITSDTNIEAAEENISLDLIQQYYLTFNFDNEPENISIENLSSDIIGQLELMPNIERFPNGKKYELDKYTMFHYLRAQEFEHGKSRIALTNSVNEALLNPSRVYTFFSSDYVKKVNKATEAAMFLGWVEQLVYDFTDETSEVSTTDKIADITIIIPYIGPALNIGNMLYKDDFVGALIFSGAVILLEFIPEIAIPVLGTFALVSYIANKVLTVQTIDNALSKRNEKWDEVYKYIVTNWLAKVNTQIDLIRKKMKETLENQAEATKAIINYQYNQYTEEEKNNINFNIDDLSSKLNESINKAMININKFLNQCSVSYLMNSMIPYGVKRLEDFDASLKDALLKYIYDNRGTLIGQVDRLKDKVNNTLSTDIPFQLSKYVDNQRLLSTFTEYIKNIINTSILNLRYESNHLIDLSRYASKINIGSKVNFDPIDKNQIQLFNLESSKIEVILKNAIVYNSMYENFSTSFWIRIPKYFNSISLNNEYTIINCMENNSGWKVSLNYGEIIWTLQDTQEIKQRVVFKYSQMINISDYINRWIFVTITNNRLNNSKIYINGRLIDQKPISNLGNIHASNNIMFKLDGCRDTHRYIWIKYFNLFDKELNEKEIKDLYDNQSNSGILKDFWGDYLQYDKPYYMLNLYDPNKYVDVNNVGIRGYMYLKGPRGSVMTTNIYLNSSLYRGTKFIIKKYASGNKDNIVRNNDRVYINVVVKNKEYRLATNASQAGVEKILSALEIPDVGNLSQVVVMKSKNDQGITNKCKMNLQDNNGNDIGFIGFHQFNNIAKLVASNWYNRQIERSSRTLGCSWEFIPVDDGWGERPLGELKYNCILNIKYEMDRDKLVDSSGYRSRINIGTGVKFSEIDKNQVQLSNLESSKIEVILNNGVIYNSMYENFSTSFWIRIPKYFRNINNEYKIISCMQNNSGWEVSLNFSNMNSKIIWTLQDTEGIKKTVVFQYTQNINISDYINRWIFVTITNNRLSNSKIYINGRLINEESISDLGNIHASNNIMFKLDGCRDPHRYIWIKYFNLFDKELNKKEIKDLYDNQSNSGILKDFWGDYLQYDKPYYMLNLYDPNKYLDVNNVGIRGYMYLKGPRGRIVTTNIYLNSTLYMGTKFIIKKYASGNKDNIVRNNDRVYINVVVKNKEYRLATNASQAGVEKILSAVEIPDVGNLSQVVVMKSENDQGIRNKCKMNLQDNNGNDIGFIGFHQFNNIAKLVASNWYNRQIGKASRTFGCSWEFIPVDDGWGESSL

SEQ ID NO: 194 - protein, 1261 aa, Artificial Sequence
  Synthetic
SLDKGYNKALNDLCIKVNNWDLFFSPSEDNFTNDLNKGEEITSDTNIEAAEENISLDLIQQYYLTFNFDNEPENISIENLSSDIIGQLELMPNIERFPNGKKYELDKYTMFHYLRAQEFEHGKSRIALTNSVNEALLNPSRVYTFFSSDYVKKVNKATEAAMFLGWVEQLVYDFTDETSEVSTTDKIADITIIIPYIGPALNIGNMLYKDDFVGALIFSGAVILLEFIPEIAIPVLGTFALVSYIANKVLTVQTIDNALSKRNEKWDEVYKYIVTNWLAKVNTQIDLIRKKMKETLENQAEATKAIINYQYNQYTEEEKNNINFNIDDLSSKLNESINKAMININKFLNQCSVSYLMNSMIPYGVKRLEDFDASLKDALLKYIYDNRGTLIGQVDRLKDKVNNTLSTDIPFQLSKYVDNQRLLSTFTEYIKNIINTSILNLRYESNHLIDLSRYASKINIGSKVNFDPIDKNQIQLFNLESSKIEVILKNAIVYNSMYENFSTSFWIRIPKYFNSISLNNEYTIINCMENNSGWKVSLNYGEIIWTLQDTQEIKQRVVFKYSQMINISDYINRWIFVTITNNRLNNSKIYINGRLIDQKPISNLGNIHASNNIMFKLDGCRDTHRYIWIKYFNLFDKELNEKEIKDLYDNQSNSGILKDFWGDYLQYDKPYYMLNLYDPNKYVDVNNVGIRGYMYLKGPRGSVMTTNIYLNSSLYRGTKFIIKKYASGNKDNIVRNNDRVYINVVVKNKEYRLATNASQAGVEKILSALEIPDVGNLSQVVVMKSKNDQGITNKCKMNLQDNNGNDIGFIGFHQFNNIAKLVASNWYNRQIERSSRTLGCSWEFIPVDDGWGERPLGKIQDLSGENTPLTLGENLHIVNGRDNQAVRLNNQLDSKLEIQSRPNIHFTAFEDFSISIWIRCSMLRNNRNRGQKYTIIQQFNKYGWQLAIQDSVFVWTLHDTFNNQIQLTSGSALTNKNYLLQNFWLHITVTNKRSEKSRLYINGVLQDQKDISVLGNCHPKEPILFSIQDNSDPNYFVRFEQFNVYRKALTDSEVNRLYWKYFEGSYLRDVWGERLTYNRDYYMQLSTLPGRGIKREYRTWSGFDYIILSELGTQKIPTHEVTYPKLYQGQKITIHSDGKNLEPHVKSNKNIRLKIDDFYIGVVNPFKLPEWRPESGAYVVTTYNHAEDLCLYFRTRSSSQSLYYGQLIMNDGRNKSLLNYTLKGSTYWIWSSAWYYENYNTSSKTAGNWYFIPVDEGWKED

SEQ ID NO: 195 - protein, 1290 aa, Artificial Sequence
  Synthetic
IVNTSILSIVYKKDDLIDLSRYGAKINIGDRVYYDSIDKNQIKLINLESSTIEVILKNAIVYNSMYENFSTSFWIKIPKYFSKINLNNEYTIINCIENNSGWKVSLNYGEIIWTLQDNKQNIQRVVFKYSQMVNISDYINRWIFVTITNNRLTKSKIYINGRLIDQKPISNLGNIHASNKIMFKLDGCRDPRRYIMIKYFNLFDKELNEKEIKDLYDSQSNSGILKDFWGNYLQYDKPYYMLNLFDPNKYVDVNNIGIRGYMYLKGPRGSVVTTNIYLNSTLYEGTKFIIKKYASGNEDNIVRNNDRVYINVVVKNKEYRLATNASQAGVEKILSALEIPDVGNLSQVVVMKSKDDQGIRNKCKMNLQDNNGNDIGFIGFHLYDNIAKLVASNWYNRQVGKASRTFGCSWEFIPVDDGWGESSLSLDEGYNKALNDLCIKVNNWDLFFSPSEDNFTNDLDKVEEITADTNIEAAEENISLDLIQQYYLTFDFDNEPENISIENLSSDIIGQLEPMPNIERFPNGKKYELDKYTMFHYLRAQEFEHGDSRIILTNSAEEALLKPNVAYTFFSSKYVKKINKAVEAFMFLNWAEELVYDFTDETNEVTTMDKIADITIIVPYIGPALNIGNMLSKGEFVEAIIFTGVVAMLEFIPEYALPVFGTFAIVSYIANKVLTVQTINNALSKRNEKWDEVYKYTVTNWLAKVNTQIDLIREKMKKALENQAEATKAIINYQYNQYTEEEKNNINFNIDDLSSKLNESINSAMININKFLDQCSVSYLMNSMIPYAVKRLKDFDASVRDVLLKYIYDNRGTLVLQVDRLKDEVNNTLSADIPFQLSKYVDNKKLLSTFTEYIKNSEILNNIILNLRYRDNNLIDLSGYGAKVEVYDGVKLNDKNQFKLTSSADSKIRVTQNQNIIFNSMFLDFSVSFWIRIPKYRNDDIQNYIHNEYTIINCMKNNSGWKISIRGNRIIWTLIDINGKTKSVFFEYNIREDISEYINRWFFVTITNNLDNAKIYINGTLESNMDIKDIGEVIVNGEITFKLDGDVDRTQFIWMKYFSIFNTQLNQSNIKEIYKIQSYSEYLKDFWGNPLMYNKEYYMFNAGNKNSYIKLVKDSSVGEILIRSKYNQNSNYINYRNLYIGEKFIIRRESNSQSINDDIVRKEDYIHLDLVLHHEEWRVYAYKYFKEQEEKLFLSIISDSNEFYKTIEIKEYDEQPSYSCQLLFKKDEESTDDIGLIGIHRFYESGVLRKKYKDYFCISKWYLKEVKRKPYKSNLGCNWQFIPKDEGWTE

SEQ ID NO: 196 - protein, 1277 aa, Artificial Sequence
  Synthetic
IVNTSILSIVYKKDDLIDLSRYGAKINIGDRVYYDSIDKNQIKLINLESSTIEVILKNAIVYNSMYENFSTSFWIKIPKYFSKINLNNEYTIINCIENNSGWKVSLNYGEIIWTLQDNKQNIQRVVFKYSQMVNISDYINRWIFVTITNNRLTKSKIYINGRLIDQKPISNLGNIHASNKIMFKLDGCRDPRRYIMIKYFNLFDKELNEKEIKDLYDSQSNSGILKDFWGNYLQYDKPYYMLNLFDPNKYVDVNNIGIRGYMYLKGPRGSVVTTNIYLNSTLYEGTKFIIKKYASGNEDNIVRNNDRVYINVVVKNKEYRLATNASQAGVEKILSALEIPDVGNLSQVVVMKSKDDQGIRNKCKMNLQDNNGNDIGFIGFHLYDNIAKLVASNWYNRQVGKASRTFGCSWEFIPVDDGWGESSLSLDEGYNKALNDLCIKVNNWDLFFSPSEDNFTNDLDKVEEITADTNIEAAEENISLDLIQQYYLTFDFDNEPENISIENLSSDIIGQLEPMPNIERFPNGKKYELDKYTMFHYLRAQEFEHGDSRIILTNSAEEALLKPNVAYTFFSSKYVKKINKAVEAFMFLNWAEELVYDFTDETNEVTTMDKIADITIIVPYIGPALNIGNMLSKGEFVEAIIFTGVVAMLEFIPEYALPVFGTFAIVSYIANKVLTVQTINNALSKRNEKWDEVYKYTVTNWLAKVNTQIDLIREKMKKALENQAEATKAIINYQYNQYTEEEKNNINFNIDDLSSKLNESINSAMININKFLDQCSVSYLMNSMIPYAVKRLKDFDASVRDVLLKYIYDNRGTLVLQVDRLKDEVNNTLSADIPFQLSKYVDNKKLLSTFTEYIKNSKILSLQNRKNTLVDTSGYNAEVSEEGDVQLNPIFPFDFKLGSSGEDRGKVIVTQNENIVYNSMYESFSISFWIRINKWVSNLPGYTIIDSVKNNSGWSIGIISNFLVFTLKQNEDSEQSINFSYDISNNAPGYNKWFFVTVTNNMMGNMKIYINGKLIDTIKVKELTGINFSKTITFEINKIPDTGLITSDSDNINMWIRDFYIFAKELDGKDINILFNSLQYTNVVKDYWGNDLRYNKEYYMVNIDYLNRYMYANSRQIVFNTRRNNNDFNEGYKIIIKRIRGNTNDTRVRGGDILYFDMTINNKAYNLFMKNETMYADNHSTEDIYAIGLREQTKDINDNIIFQIQPMNNTYYYASQIFKSNFNGENISGICSIGTYRFRLGGDWYRHNYLVPTVKQGNYASLLESTSTHWGFVPVSE

SEQ ID NO: 197 - protein, 1270 aa, Artificial Sequence
  Synthetic
IVNTSILSIVYKKDDLIDLSRYGAKINIGDRVYYDSIDKNQIKLINLESSTIEVILKNAIVYNSMYENFSTSFWIKIPKYFSKINLNNEYTIINCIENNSGWKVSLNYGEIIWTLQDNKQNIQRVVFKYSQMVNISDYINRWIFVTITNNRLTKSKIYINGRLIDQKPISNLGNIHASNKIMFKLDGCRDPRRYIMIKYFNLFDKELNEKEIKDLYDSQSNSGILKDFWGNYLQYDKPYYMLNLFDPNKYVDVNNIGIRGYMYLKGPRGSVVTTNIYLNSTLYEGTKFIIKKYASGNEDNIVRNNDRVYINVVVKNKEYRLATNASQAGVEKILSALEIPDVGNLSQVVVMKSKDDQGIRNKCKMNLQDNNGNDIGFIGFHLYDNIAKLVASNWYNRQVGKASRTFGCSWEFIPVDDGWGESSLSLDEGYNKALNDLCIKVNNWDLFFSPSEDNFTNDLDKVEEITADTNIEAAEENISLDLIQQYYLTFDFDNEPENISIENLSSDIIGQLEPMPNIERFPNGKKYELDKYTMFHYLRAQEFEHGDSRIILTNSAEEALLKPNVAYTFFSSKYVKKINKAVEAFMFLNWAEELVYDFTDETNEVTTMDKIADITIIVPYIGPALNIGNMLSKGEFVEAIIFTGVVAMLEFIPEYALPVFGTFAIVSYIANKVLTVQTINNALSKRNEKWDEVYKYTVTNWLAKVNTQIDLIREKMKKALENQAEATKAIINYQYNQYTEEEKNNINFNIDDLSSKLNESINSAMININKFLDQCSVSYLMNSMIPYAVKRLKDFDASVRDVLLKYIYDNRGTLVLQVDRLKDEVNNTLSADIPFQLSKYVDNKKLLSTFTEYIKNSINDSKILSLQNKKNALVDTSGYNAEVRVGDNVQLNTIYTNDFKLSSSGDKIIVNLNNNILYSAIYENSSVSFWIKISKDLTNSHNEYTIINSIEQNSGWKLCIRNGNIEWILQDVNRKYKSLIFDYSESLSHTGYTNKWFFVTITNNIMGYMKLYINGELKQSQKIEDLDEVKLDKTIVFGIDENIDENQMLWIRDFNIFSKELSNEDINIVYEGQILRNVIKDYWGNPLKFDTEYYIINDNYIDRYIAPESNVLVLVQYPDRSKLYTGNPITIKSVSDKNPYSRILNGDNIILHMLYNSRKYMIIRDTDTIYATQGGECSQNCVYALKLQSNLGNYGIGIFSIKNIVSKNKYCSQIFSSFRENTMLLADIYKPWRFSFKNAYTPVAVTNYETKLLSTSSFWKFISRDPGWVE

SEQ ID NO: 198 - protein, 1264 aa, Artificial Sequence
  Synthetic
IVNTSILSIVYKKDDLIDLSRYGAKINIGDRVYYDSIDKNQIKLINLESSTIEVILKNAIVYNSMYENFSTSFWIKIPKYFSKINLNNEYTIINCIENNSGWKVSLNYGEIIWTLQDNKQNIQRVVFKYSQMVNISDYINRWIFVTITNNRLTKSKIYINGRLIDQKPISNLGNIHASNKIMFKLDGCRDPRRYIMIKYFNLFDKELNEKEIKDLYDSQSNSGILKDFWGNYLQYDKPYYMLNLFDPNKYVDVNNIGIRGYMYLKGPRGSVVTTNIYLNSTLYEGTKFIIKKYASGNEDNIVRNNDRVYINVVVKNKEYRLATNASQAGVEKILSALEIPDVGNLSQVVVMKSKDDQGIRNKCKMNLQDNNGNDIGFIGFHLYDNIAKLVASNWYNRQVGKASRTFGCSWEFIPVDDGWGESSLSLDEGYNKALNDLCIKVNNWDLFFSPSEDNFTNDLDKVEEITADTNIEAAEENISLDLIQQYYLTFDFDNEPENISIENLSSDIIGQLEPMPNIERFPNGKKYELDKYTMFHYLRAQEFEHGDSRIILTNSAEEALLKPNVAYTFFSSKYVKKINKAVEAFMFLNWAEELVYDFTDETNEVTTMDKIADITIIVPYIGPALNIGNMLSKGEFVEAIIFTGVVAMLEFIPEYALPVFGTFAIVSYIANKVLTVQTINNALSKRNEKWDEVYKYTVTNWLAKVNTQIDLIREKMKKALENQAEATKAIINYQYNQYTEEEKNNINFNIDDLSSKLNESINSAMININKFLDQCSVSYLMNSMIPYAVKRLKDFDASVRDVLLKYIYDNRGTLVLQVDRLKDEVNNTLSADIPFQLSKYVDNKKLLSTFTEYIKNKRIKSSSVLNMRYKNDKYVDTSGYDSNININGDVYKYPTNKNQFGIYNDKLSEVNISQNDYIIYDNKYKNFSISFWVRIPNYDNKIVNVNNEYTIINCMRDNNSGWKVSLNHNEIIWTLQDNAGINQKLAFNYGNANGISDYINKWIFVTITNDRLGDSKLYINGNLIDQKSILNLGNIHVSDNILFKIVNCSYTRYIGIRYFNIFDKELDETEIQTLYSNEPNTNILKDFWGNYLLYDKEYYLLNVLKPNNFIDRRKDSTLSINNIRSTILLANRLYSGIKVKIQRVNNSSTNDNLVRKNDQVYINFVASKTHLFPLYADTATTNKEKTIKISSSGNRFNQVVVMNSVGNNCTMNFKNNNGNNIGLLGFKADTVVASTWYYTHMRDHTNSNGCFWNFISEEHGWQEK

SEQ ID NO: 199 - protein, 1271 aa, Artificial Sequence
  Synthetic
IVNTSILSIVYKKDDLIDLSRYGAKINIGDRVYYDSIDKNQIKLINLESSTIEVILKNAIVYNSMYENFSTSFWIKIPKYFSKINLNNEYTIINCIENNSGWKVSLNYGEIIWTLQDNKQNIQRVVFKYSQMVNISDYINRWIFVTITNNRLTKSKIYINGRLIDQKPISNLGNIHASNKIMFKLDGCRDPRRYIMIKYFNLFDKELNEKEIKDLYDSQSNSGILKDFWGNYLQYDKPYYMLNLFDPNKYVDVNNIGIRGYMYLKGPRGSVVTTNIYLNSTLYEGTKFIIKKYASGNEDNIVRNNDRVYINVVVKNKEYRLATNASQAGVEKILSALEIPDVGNLSQVVVMKSKDDQGIRNKCKMNLQDNNGNDIGFIGFHLYDNIAKLVASNWYNRQVGKASRTFGCSWEFIPVDDGWGESSLSLDEGYNKALNDLCIKVNNWDLFFSPSEDNFTNDLDKVEEITADTNIEAAEENISLDLIQQYYLTFDFDNEPENISIENLSSDIIGQLEPMPNIERFPNGKKYELDKYTMFHYLRAQEFEHGDSRIILTNSAEEALLKPNVAYTFFSSKYVKKINKAVEAFMFLNWAEELVYDFTDETNEVTTMDKIADITIIVPYIGPALNIGNMLSKGEFVEAIIFTGVVAMLEFIPEYALPVFGTFAIVSYIANKVLTVQTINNALSKRNEKWDEVYKYTVTNWLAKVNTQIDLIREKMKKALENQAEATKAIINYQYNQYTEEEKNNINFNIDDLSSKLNESINSAMININKFLDQCSVSYLMNSMIPYAVKRLKDFDASVRDVLLKYIYDNRGTLVLQVDRLKDEVNNTLSADIPFQLSKYVDNKKLLSTFTEYIKNKKIKDNSILDMRYENNKFIDISGYGSNISINGDVYIYSTNRNQFGIYSSKPSEVNIAQNNDIIYNGRYQNFSISFWVRIPKYFNKVNLNNEYTIIDCIRNNNSGWKISLNYNKIIWTLQDTAGNNQKLVFNYTQMISISDYINKWIFVTITNNRLGNSRIYINGNLIDEKSISNLGDIHVSDNILFKIVGCNDTRYVGIRYFKVFDTELGKTEIETLYSDEPDPSILKDFWGNYLLYNKRYYLLNLLRTDKSITQNSNFLNINQQRGVYQKPNIFSNTRLYTGVEVIIRKNGSTDISNTDNFVRKNDLAYINVVDRDVEYRLYADISIAKPEKIIKLIRTSNSNNSLGQIIVMDSIGNNCTMNFQNNNGGNIGLLGFHSNNLVASSWYYNNIRKNTSSNGCFWSFISKEHGWQEN

SEQ ID NO: 200 - protein, 1291 aa, Artificial Sequence
  Synthetic
IVNTSILSIVYKKDDLIDLSRYGAKINIGDRVYYDSIDKNQIKLINLESSTIEVILKNAIVYNSMYENFSTSFWIKIPKYFSKINLNNEYTIINCIENNSGWKVSLNYGEIIWTLQDNKQNIQRVVFKYSQMVNISDYINRWIFVTITNNRLTKSKIYINGRLIDQKPISNLGNIHASNKIMFKLDGCRDPRRYIMIKYFNLFDKELNEKEIKDLYDSQSNSGILKDFWGNYLQYDKPYYMLNLFDPNKYVDVNNIGIRGYMYLKGPRGSVVTTNIYLNSTLYEGTKFIIKKYASGNEDNIVRNNDRVYINVVVKNKEYRLATNASQAGVEKILSALEIPDVGNLSQVVVMKSKDDQGIRNKCKMNLQDNNGNDIGFIGFHLYDNIAKLVASNWYNRQVGKASRTFGCSWEFIPVDDGWGESSLSLDEGYNKALNDLCIKVNNWDLFFSPSEDNFTNDLDKVEEITADTNIEAAEENISLDLIQQYYLTFDFDNEPENISIENLSSDIIGQLEPMPNIERFPNGKKYELDKYTMFHYLRAQEFEHGDSRIILTNSAEEALLKPNVAYTFFSSKYVKKINKAVEAFMFLNWAEELVYDFTDETNEVTTMDKIADITIIVPYIGPALNIGNMLSKGEFVEAIIFTGVVAMLEFIPEYALPVFGTFAIVSYIANKVLTVQTINNALSKRNEKWDEVYKYTVTNWLAKVNTQIDLIREKMKKALENQAEATKAIINYQYNQYTEEEKNNINFNIDDLSSKLNESINSAMININKFLDQCSVSYLMNSMIPYAVKRLKDFDASVRDVLLKYIYDNRGTLVLQVDRLKDEVNNTLSADIPFQLSKYVDNKKLLSTFTEYIKNSNISSNAILSLSYRGGRLIDSSGYGATMNVGSDVIFNDIGNGQFKLNNSENSNITAHQSKFVVYDSMFDNFSINFWVRTPKYNNNDIQTYLQNEYTIISCIKNDSGWKVSIKGNRIIWTLIDVNAKSKSIFFEYSIKDNISDYINKWFSITITNDRLGNANIYINGSLKKSEKILNLDRINSSNDIDFKLINCTDTTKFVWIKDFNIFGRELNATEVSSLYWIQSSTNTLKDFWGNPLRYDTQYYLFNQGMQNIYIKYFSKASMGETAPRTNFNNAAINYQNLYLGLRFIIKKASNSRNINNDNIVREGDYIYLNIDNISDESYRVYVLVNSKEIQTQLFLAPINDDPTFYDVLQIKKYYEKTTYNCQILCEKDTKTFGLFGIGKFVKDYGYVWDTYDNYFCISQWYLRRISENINKLRLGCNWQFIPVDEGWTE

SEQ ID NO: 201 - protein, 1286 aa, Artificial Sequence
  Synthetic
IVNTSILSIVYKKDDLIDLSRYGAKINIGDRVYYDSIDKNQIKLINLESSTIEVILKNAIVYNSMYENFSTSFWIKIPKYFSKINLNNEYTIINCIENNSGWKVSLNYGEIIWTLQDNKQNIQRVVFKYSQMVNISDYINRWIFVTITNNRLTKSKIYINGRLIDQKPISNLGNIHASNKIMFKLDGCRDPRRYIMIKYFNLFDKELNEKEIKDLYDSQSNSGILKDFWGNYLQYDKPYYMLNLFDPNKYVDVNNIGIRGYMYLKGPRGSVVTTNIYLNSTLYEGTKFIIKKYASGNEDNIVRNNDRVYINVVVKNKEYRLATNASQAGVEKILSALEIPDVGNLSQVVVMKSKDDQGIRNKCKMNLQDNNGNDIGFIGFHLYDNIAKLVASNWYNRQVGKASRTFGCSWEFIPVDDGWGESSLSLDEGYNKALNDLCIKVNNWDLFFSPSEDNFTNDLDKVEEITADTNIEAAEENISLDLIQQYYLTFDFDNEPENISIENLSSDIIGQLEPMPNIERFPNGKKYELDKYTMFHYLRAQEFEHGDSRIILTNSAEEALLKPNVAYTFFSSKYVKKINKAVEAFMFLNWAEELVYDFTDETNEVTTMDKIADITIIVPYIGPALNIGNMLSKGEFVEAIIFTGVVAMLEFIPEYALPVFGTFAIVSYIANKVLTVQTINNALSKRNEKWDEVYKYTVTNWLAKVNTQIDLIREKMKKALENQAEATKAIINYQYNQYTEEEKNNINFNIDDLSSKLNESINSAMININKFLDQCSVSYLMNSMIPYAVKRLKDFDASVRDVLLKYIYDNRGTLVLQVDRLKDEVNNTLSADIPFQLSKYVDNKKLLSTFTEYIKNGELKYNCILNIKYEMDRDKLVDSSGYRSRINIGTGVKFSEIDKNQVQLSNLESSKIEVILNNGVIYNSMYENFSTSFWIRIPKYFRNINNEYKIISCMQNNSGWEVSLNFSNMNSKIIWTLQDTEGIKKTVVFQYTQNINISDYINRWIFVTITNNRLSNSKIYINGRLINEESISDLGNIHASNNIMFKLDGCRDPHRYIWIKYFNLFDKELNKKEIKDLYDNQSNSGILKDFWGDYLQYDKPYYMLNLYDPNKYLDVNNVGIRGYMYLKGPRGRIVTTNIYLNSTLYMGTKFIIKKYASGNKDNIVRNNDRVYINVVVKNKEYRLATNASQAGVEKILSAVEIPDVGNLSQVVVMKSENDQGIRNKCKMNLQDNNGNDIGFIGFHQFNNIAKLVASNWYNRQIGKASRTFGCSWEFIPVDDGWGESSL

SEQ ID NO: 202 - protein, 1261 aa, Artificial Sequence
  Synthetic
IVNTSILSIVYKKDDLIDLSRYGAKINIGDRVYYDSIDKNQIKLINLESSTIEVILKNAIVYNSMYENFSTSFWIKIPKYFSKINLNNEYTIINCIENNSGWKVSLNYGEIIWTLQDNKQNIQRVVFKYSQMVNISDYINRWIFVTITNNRLTKSKIYINGRLIDQKPISNLGNIHASNKIMFKLDGCRDPRRYIMIKYFNLFDKELNEKEIKDLYDSQSNSGILKDFWGNYLQYDKPYYMLNLFDPNKYVDVNNIGIRGYMYLKGPRGSVVTTNIYLNSTLYEGTKFIIKKYASGNEDNIVRNNDRVYINVVVKNKEYRLATNASQAGVEKILSALEIPDVGNLSQVVVMKSKDDQGIRNKCKMNLQDNNGNDIGFIGFHLYDNIAKLVASNWYNRQVGKASRTFGCSWEFIPVDDGWGESSLSLDEGYNKALNDLCIKVNNWDLFFSPSEDNFTNDLDKVEEITADTNIEAAEENISLDLIQQYYLTFDFDNEPENISIENLSSDIIGQLEPMPNIERFPNGKKYELDKYTMFHYLRAQEFEHGDSRIILTNSAEEALLKPNVAYTFFSSKYVKKINKAVEAFMFLNWAEELVYDFTDETNEVTTMDKIADITIIVPYIGPALNIGNMLSKGEFVEAIIFTGVVAMLEFIPEYALPVFGTFAIVSYIANKVLTVQTINNALSKRNEKWDEVYKYTVTNWLAKVNTQIDLIREKMKKALENQAEATKAIINYQYNQYTEEEKNNINFNIDDLSSKLNESINSAMININKFLDQCSVSYLMNSMIPYAVKRLKDFDASVRDVLLKYIYDNRGTLVLQVDRLKDEVNNTLSADIPFQLSKYVDNKKLLSTFTEYIKNGKIQDLSGENTPLTLGENLHIVNGRDNQAVRLNNQLDSKLEIQSRPNIHFTAFEDFSISIWIRCSMLRNNRNRGQKYTIIQQFNKYGWQLAIQDSVFVWTLHDTFNNQIQLTSGSALTNKNYLLQNFWLHITVTNKRSEKSRLYINGVLQDQKDISVLGNCHPKEPILFSIQDNSDPNYFVRFEQFNVYRKALTDSEVNRLYWKYFEGSYLRDVWGERLTYNRDYYMQLSTLPGRGIKREYRTWSGFDYIILSELGTQKIPTHEVTYPKLYQGQKITIHSDGKNLEPHVKSNKNIRLKIDDFYIGVVNPFKLPEWRPESGAYVVTTYNHAEDLCLYFRTRSSSQSLYYGQLIMNDGRNKSLLNYTLKGSTYWIWSSAWYYENYNTSSKTAGNWYFIPVDEGWKED

SEQ ID NO: 203 - protein, 1306 aa, Artificial Sequence
  Synthetic
MPFVNKQFNYRDPVNGVDIAYIKIPNAGQMQPVKAFKIHNKIWVIPERDTFTNPEEGDLNPPPEAKQVPVSYYDSTYLSTDNEKDNYLKGVTKLFERIYSTDLGRMLLTSIVRGIPFWGGSTIDTELKVIDTNCINVIQPDGSYRSEELNLVIIGPSADIIQFECKSFGHEVLNLTRNGYGSTQYIRFSPDFTFGFEESLEVDTNPLLGAGKFATDPAVTLAHELIHAGHRLYGIAINPNRVFKVNTNAYYEMSGLEVSFEELRTFGGHDAKFIDSLQENEFRLYYYNRFRDIASTLNRAKSIVGTTASLQYMKNVFKEKYLLSEDTSGKFSVDRLRFDKLYRMLTEIYTEDNFVKFFKVLNRKTYLNFDKAVFRINIVPRVNYTIYDGFNLRNTNLAANFNGQNTEINNMNFTRLKNFTGLFEFYKLLCVRGIITSKTKSLDKGYNKALNDLCIKVNNWDLFFSPSEDNFTNDLNKGEEITSDTNIEAAEENISLDLIQQYYLTFNFDNEPENISIENLSSDIIGQLELMPNIERFPNGKKYELDKYTMFHYLRAQEFEHGKSRIALTNSVNEALLNPSRVYTFFSSDYVKKVNKATEAAMFLGWVEQLVYDFTDETSEVSTTDKIADITIIIPYIGPALNIGNMLYKDDFVGALIFSGAVILLEFIPEIAIPVLGTFALVSYIANKVLTVQTIDNALSKRNEKWDEVYKYIVTNWLAKVNTQIDLIRKKMKETLENQAEATKAIINYQYNQYTEEEKNNINFNIDDLSSKLNESINKAMININKFLNQCSVSYLMNSMIPYGVKRLEDFDASLKDALLKYIYDNRGTLIGQVDRLKDKVNNTLSTDIPFQLSKYVDNQRLLSTFTEYIKNSEILNNIILNLRYRDNNLIDLSGYGAKVEVYDGVKLNDKNQFKLTSSADSKIRVTQNQNIIFNSMFLDFSVSFWIRIPKYRNDDIQNYIHNEYTIINCMKNNSGWKISIRGNRIIWTLIDINGKTKSVFFEYNIREDISEYINRWFFVTITNNLDNAKIYINGTLESNMDIKDIGEVIVNGEITFKLDGDVDRTQFIWMKYFSIFNTQLNQSNIKEIYKIQSYSEYLKDFWGNPLMYNKEYYMFNAGNKNSYIKLVKDSSVGEILIRSKYNQNSNYINYRNLYIGEKFIIRRESNSQSINDDIVRKEDYIHLDLVLHHEEWRVYAYKYFKEQEEKLFLSIISDSNEFYKTIEIKEYDEQPSYSCQLLFKKDEESTDDIGLIGIHRFYESGVLRKKYKDYFCISKWYLKEVKRKPYKSNLGCNWQFIPKDEGWTE

SEQ ID NO: 204 - protein, 424 aa, Clostridium botulinum
IVNTSILSIVYKKDDLIDLSRYGAKINIGDRVYYDSIDKNQIKLINLESSTIEVILKNAIVYNSMYENFSTSFWIKIPKYFSKINLNNEYTIINCIENNSGWKVSLNYGEIIWTLQDNKQNIQRVVFKYSQMVNISDYINRWIFVTITNNRLTKSKIYINGRLIDQKPISNLGNIHASNKIMFKLDGCRDPRRYIMIKYFNLFDKELNEKEIKDLYDSQSNSGILKDFWGNYLQYDKPYYMLNLFDPNKYVDVNNIGIRGYMYLKGPRGSVVTTNIYLNSTLYEGTKFIIKKYASGNEDNIVRNNDRVYINVVVKNKEYRLATNASQAGVEKILSALEIPDVGNLSQVVVMKSKDDQGIRNKCKMNLQDNNGNDIGFIGFHLYDNIAKLVASNWYNRQVGKASRTFGCSWEFIPVDDGWGESSL

SEQ ID NO: 205 - protein, 424 aa, Artificial Sequence
  Synthetic
IINTSILNLRYESNHLIDLSRYASKINIGSKVNFDPIDKNQIQLFNLESSKIEVILKNAIVYNSMYENFSTSFWIRIPKYFNSISLNNEYTIINCMENNSGWKVSLNYGEIIWTLQDTQEIKQRVVFKYSQMINISDYINRWIFVTITNNRLNNSKIYINGRLIDQKPISNLGNIHASNNIMFKLDGCRDTHRYIWIKYFNLFDKELNEKEIKDLYDNQSNSGILKDFWGDYLQYDKPYYMLNLYDPNKYVDVNNVGIRGYMYLKGPRGSVMTTNIYLNSSLYRGTKFIIKKYASGNKDNIVRNNDRVYINVVVKNKEYRLATNASQAGVEKILSALEIPDVGNLSQVVVMKSKNDQGITNKCKMNLQDNNGNDIGFIGFHQFNNIAKLVASNWYNRQIERSSRTLGCSWEFIPVDDGWGERPL

SEQ ID NO: 206 - protein, 4 aa, Artificial Sequence
  Synthetic
LVPR

SEQ ID NO: 207 - protein, 6 aa, Artificial Sequence
  Synthetic
ENLYFQ

SEQ ID NO: 208 - protein, 6 aa, Artificial Sequence
  Synthetic
LEVLFQ

SEQ ID NO: 209 - protein, 4 aa, Artificial Sequence
  Synthetic
IEGR

SEQ ID NO: 210 - protein, 4 aa, Artificial Sequence
  Synthetic
IDGR

SEQ ID NO: 211 - protein, 5 aa, Artificial Sequence
  Synthetic
DDDDK

SEQ ID NO: 212 - protein, 8 aa, Artificial Sequence
  Synthetic
AHREQIGG

SEQ ID NO: 213 - protein, 1293 aa, Clostridium botulinum
MPFVNKQFNYKDPVNGVDIAYIKIPNAGQMQPVKAFKIHNKIWVIPERDTFTNPEEGDLNPPPEAKQVPVSYYDSTYLSTDNEKDNYLKGVTKLFERIYSTDLGRMLLTSIVRGIPFWGGSTIDTELKVIDTNCINVIQPDGSYRSEELNLVIIGPSADIIQFECKSFGHEVLNLTRNGYGSTQYIRFSPDFTFGFEESLEVDTNPLLGAGKFATDPAVTLAHELIHAGHRLYGIAINPNRVFKVNTNAYYEMSGLEVSFEELRTFGGHDAKFIDSLQENEFRLYYYNKFKDIASTLNKAKSIVGTTASLQYMKNVFKEKYLLSEDTSGKFSVDKLKFDKLYKMLTEIYTEDNFVKFFKVLNRKTYLNFDKAVFKINIVPKVNYTIYDGFNLRNTNLAANFNGQNTEINNMNFTKLKNFTGLFEFYKLLCVRGIITSTSLVPRGSALNDLCIKVNNWDLFFSPSEDNFTNDLNKGEEITSDTNIEAAEENISLDLIQQYYLTFNFDNEPENISIENLSSDIIGQLELMPNIERFPNGKKYELDKYTMFHYLRAQEFEHGKSRIALTNSVNEALLNPSRVYTFFSSDYVKKVNKATEAAMFLGWVEQLVYDFTDETSEVSTTDKIADITIIIPYIGPALNIGNMLYKDDFVGALIFSGAVILLEFIPEIAIPVLGTFALVSYIANKVLTVQTIDNALSKRNEKWDEVYKYIVTNWLAKVNTQIDLIRKKMKEALENQAEATKAIINYQYNQYTEEEKNNINFNIDDLSSKLNESINKAMININKFLNQCSVSYLMNSMIPYGVKRLEDFDASLKDALLKYIYDNRGTLIGQVDRLKDKVNNTLSTDIPFQLSKYVDNQRLLSTFTEYIKNIINTSILNLRYESNHLIDLSRYASKINIGSKVNFDPIDKNQIQLFNLESSKIEVILKNAIVYNSMYENFSTSFWIRIPKYFNSISLNNEYTIINCMENNSGWKVSLNYGEIIWTLQDTQEIKQRVVFKYSQMINISDYINRWIFVTITNNRLNNSKIYINGRLIDQKPISNLGNIHASNNIMFKLDGCRDTHRYIWIKYFNLFDKELNEKEIKDLYDNQSNSGILKDFWGDYLQYDKPYYMLNLYDPNKYVDVNNVGIRGYMYLKGPRGSVMTTNIYLNSSLYRGTKFIIKKYASGNKDNIVRNNDRVYINVVVKNKEYRLATNASQAGVEKILSALEIPDVGNLSQVVVMKSKNDQGITNKCKMNLQDNNGNDIGFIGFHQFNNIAKLVASNWYNRQIERSSRTLGCSWEFIPVDDGWGERPL

SEQ ID NO: 214 - protein, 1293 aa, Artificial Sequence
  Synthetic
MPFVNKQFNYRDPVNGVDIAYIKIPNAGQMQPVKAFKIHNKIWVIPERDTFTNPEEGDLNPPPEAKQVPVSYYDSTYLSTDNEKDNYLKGVTKLFERIYSTDLGRMLLTSIVRGIPFWGGSTIDTELKVIDTNCINVIQPDGSYRSEELNLVIIGPSADIIQFECKSFGHEVLNLTRNGYGSTQYIRFSPDFTFGFEESLEVDTNPLLGAGKFATDPAVTLAHELIHAGHRLYGIAINPNRVFKVNTNAYYEMSGLEVSFEELRTFGGHDAKFIDSLQENEFRLYYYNRFRDIASTLNRAKSIVGTTASLQYMKNVFKEKYLLSEDTSGKFSVDRLRFDKLYRMLTEIYTEDNFVKFFKVLNRKTYLNFDKAVFRINIVPRVNYTIYDGFNLRNTNLAANFNGQNTEINNMNFTRLKNFTGLFEFYKLLCVRGIITSTSLVPRGSALNDLCIKVNNWDLFFSPSEDNFTNDLNKGEEITSDTNIEAAEENISLDLIQQYYLTFNFDNEPENISIENLSSDIIGQLELMPNIERFPNGKKYELDKYTMFHYLRAQEFEHGKSRIALTNSVNEALLNPSRVYTFFSSDYVKKVNKATEAAMFLGWVEQLVYDFTDETSEVSTTDKIADITIIIPYIGPALNIGNMLYKDDFVGALIFSGAVILLEFIPEIAIPVLGTFALVSYIANKVLTVQTIDNALSKRNEKWDEVYKYIVTNWLAKVNTQIDLIRKKMKEALENQAEATKAIINYQYNQYTEEEKNNINFNIDDLSSKLNESINKAMININKFLNQCSVSYLMNSMIPYGVKRLEDFDASLKDALLKYIYDNRGTLIGQVDRLKDKVNNTLSTDIPFQLSKYVDNQRLLSTFTEYIKNIINTSILNLRYESNHLIDLSRYASKINIGSKVNFDPIDKNQIQLFNLESSKIEVILKNAIVYNSMYENFSTSFWIRIPKYFNSISLNNEYTIINCMENNSGWKVSLNYGEIIWTLQDTQEIKQRVVFKYSQMINISDYINRWIFVTITNNRLNNSKIYINGRLIDQKPISNLGNIHASNNIMFKLDGCRDTHRYIWIKYFNLFDKELNEKEIKDLYDNQSNSGILKDFWGDYLQYDKPYYMLNLYDPNKYVDVNNVGIRGYMYLKGPRGSVMTTNIYLNSSLYRGTKFIIKKYASGNKDNIVRNNDRVYINVVVKNKEYRLATNASQAGVEKILSALEIPDVGNLSQVVVMKSKNDQGITNKCKMNLQDNNGNDIGFIGFHQFNNIAKLVASNWYNRQIERSSRTLGCSWEFIPVDDGWGERPL

SEQ ID NO: 215 - protein, 1293 aa, Clostridium botulinum
MPFVNKQFNYKDPVNGVDIAYIKIPNAGQMQPVKAFKIHNKIWVIPERDTFTNPEEGDLNPPPEAKQVPVSYYDSTYLSTDNEKDNYLKGVTKLFERIYSTDLGRMLLTSIVRGIPFWGGSTIDTELKVIDTNCINVIQPDGSYRSEELNLVIIGPSADIIQFECKSFGHDVLNLTRNGYGSTQYIRFSPDFTFGFEESLEVDTNPLLGAGKFATDPAVTLAHELIHAEHRLYGIAINPNRVFKVNTNAYYEMSGLEVSFEELRTFGGHDAKFIDSLQENEFRLYYYNKFKDVASTLNKAKSIIGTTASLQYMKNVFKEKYLLSEDTSGKFSVDKLKFDKLYKMLTEIYTEDNFVNFFKVINRKTYLNFDKAVFRINIVPDENYTIKDGFNLKGANLSTNFNGQNTEINSRNFTRLKNFTGLFEFYKLLCVRGIIPFTSLVPRGSALNDLCIKVNNWDLFFSPSEDNFTNDLDKVEEITADTNIEAAEENISLDLIQQYYLTFDFDNEPENISIENLSSDIIGQLEPMPNIERFPNGKKYELDKYTMFHYLRAQEFEHGDSRIILTNSAEEALLKPNVAYTFFSSKYVKKINKAVEAFMFLNWAEELVYDFTDETNEVTTMDKIADITIIVPYIGPALNIGNMLSKGEFVEAIIFTGVVAMLEFIPEYALPVFGTFAIVSYIANKVLTVQTINNALSKRNEKWDEVYKYTVTNWLAKVNTQIDLIREKMKKALENQAEATKAIINYQYNQYTEEEKNNINFNIDDLSSKLNESINSAMININKFLDQCSVSYLMNSMIPYAVKRLKDFDASVRDVLLKYIYDNRGTLVLQVDRLKDEVNNTLSADIPFQLSKYVDNKKLLSTFTEYIKNIVNTSILSIVYKKDDLIDLSRYGAKINIGDRVYYDSIDKNQIKLINLESSTIEVILKNAIVYNSMYENFSTSFWIKIPKYFSKINLNNEYTIINCIENNSGWKVSLNYGEIIWTLQDNKQNIQRVVFKYSQMVNISDYINRWIFVTITNNRLTKSKIYINGRLIDQKPISNLGNIHASNKIMFKLDGCRDPRRYIMIKYFNLFDKELNEKEIKDLYDSQSNSGILKDFWGNYLQYDKPYYMLNLFDPNKYVDVNNIGIRGYMYLKGPRGSVVTTNIYLNSTLYEGTKFIIKKYASGNEDNIVRNNDRVYINVVVKNKEYRLATNASQAGVEKILSALEIPDVGNLSQVVVMKSKDDQGIRNKCKMNLQDNNGNDIGFIGFHLYDNIAKLVASNWYNRQVGKASRTFGCSWEFIPVDDGWGESSL

SEQ ID NO: 216 - protein, 1293 aa, Artificial Sequence
  Synthetic
MPFVNKQFNYRDPVNGVDIAYIKIPNAGQMQPVKAFKIHNKIWVIPERDTFTNPEEGDLNPPPEAKQVPVSYYDSTYLSTDNEKDNYLKGVTKLFERIYSTDLGRMLLTSIVRGIPFWGGSTIDTELKVIDTNCINVIQPDGSYRSEELNLVIIGPSADIIQFECKSFGHDVLNLTRNGYGSTQYIRFSPDFTFGFEESLEVDTNPLLGAGKFATDPAVTLAHELIHAEHRLYGIAINPNRVFKVNTNAYYEMSGLEVSFEELRTFGGHDAKFIDSLQENEFRLYYYNRFRDVASTLNRAKSIIGTTASLQYMKNVFKEKYLLSEDTSGKFSVDRLRFDKLYRMLTEIYTEDNFVNFFKVINRKTYLNFDKAVFRINIVPDENYTIKDGFNLKGANLSTNFNGQNTEINSRNFTRLKNFTGLFEFYKLLCVRGIIPFTSLVPRGSALNDLCIKVNNWDLFFSPSEDNFTNDLDKVEEITADTNIEAAEENISLDLIQQYYLTFDFDNEPENISIENLSSDIIGQLEPMPNIERFPNGKKYELDKYTMFHYLRAQEFEHGDSRIILTNSAEEALLKPNVAYTFFSSKYVKKINKAVEAFMFLNWAEELVYDFTDETNEVTTMDKIADITIIVPYIGPALNIGNMLSKGEFVEAIIFTGVVAMLEFIPEYALPVFGTFAIVSYIANKVLTVQTINNALSKRNEKWDEVYKYTVTNWLAKVNTQIDLIREKMKKALENQAEATKAIINYQYNQYTEEEKNNINFNIDDLSSKLNESINSAMININKFLDQCSVSYLMNSMIPYAVKRLKDFDASVRDVLLKYIYDNRGTLVLQVDRLKDEVNNTLSADIPFQLSKYVDNKKLLSTFTEYIKNIVNTSILSIVYKKDDLIDLSRYGAKINIGDRVYYDSIDKNQIKLINLESSTIEVILKNAIVYNSMYENFSTSFWIKIPKYFSKINLNNEYTIINCIENNSGWKVSLNYGEIIWTLQDNKQNIQRVVFKYSQMVNISDYINRWIFVTITNNRLTKSKIYINGRLIDQKPISNLGNIHASNKIMFKLDGCRDPRRYIMIKYFNLFDKELNEKEIKDLYDSQSNSGILKDFWGNYLQYDKPYYMLNLFDPNKYVDVNNIGIRGYMYLKGPRGSVVTTNIYLNSTLYEGTKFIIKKYASGNEDNIVRNNDRVYINVVVKNKEYRLATNASQAGVEKILSALEIPDVGNLSQVVVMKSKDDQGIRNKCKMNLQDNNGNDIGFIGFHLYDNIAKLVASNWYNRQVGKASRTFGCSWEFIPVDDGWGESSL

SEQ ID NO: 217 - protein, 1303 aa, Artificial Sequence
  Synthetic
MPFVNKQFNYRDPVNGVDIAYIKIPNAGQMQPVKAFKIHNKIWVIPERDTFTNPEEGDLNPPPEAKQVPVSYYDSTYLSTDNEKDNYLKGVTKLFERIYSTDLGRMLLTSIVRGIPFWGGSTIDTELKVIDTNCINVIQPDGSYRSEELNLVIIGPSADIIQFECKSFGHEVLNLTRNGYGSTQYIRFSPDFTFGFEESLEVDTNPLLGAGKFATDPAVTLAHELIHAGHRLYGIAINPNRVFKVNTNAYYEMSGLEVSFEELRTFGGHDAKFIDSLQENEFRLYYYNRFRDIASTLNRAKSIVGTTASLQYMKNVFKEKYLLSEDTSGKFSVDRLRFDKLYRMLTEIYTEDNFVKFFKVLNRKTYLNFDKAVFRINIVPRVNYTIYDGFNLRNTNLAANFNGQNTEINNMNFTRLKNFTGLFEFYKLLCVRGIIPFTSLVPRGSALNDLCIKVNNWDLFFSPSEDNFTNDLNKGEEITSDTNIEAAEENISLDLIQQYYLTFNFDNEPENISIENLSSDIIGQLELMPNIERFPNGKKYELDKYTMFHYLRAQEFEHGKSRIALTNSVNEALLNPSRVYTFFSSDYVKKVNKATEAAMFLGWVEQLVYDFTDETSEVSTTDKIADITIIIPYIGPALNIGNMLYKDDFVGALIFSGAVILLEFIPEIAIPVLGTFALVSYIANKVLTVQTIDNALSKRNEKWDEVYKYIVTNWLAKVNTQIDLIRKKMKETLENQAEATKAIINYQYNQYTEEEKNNINFNIDDLSSKLNESINKAMININKFLNQCSVSYLMNSMIPYGVKRLEDFDASLKDALLKYIYDNRGTLIGQVDRLKDKVNNTLSTDIPFQLSKYVDNQRLLSTFTEYIKNSEILNNIILNLRYRDNNLIDLSGYGAKVEVYDGVKLNDKNQFKLTSSADSKIRVTQNQNIIFNSMFLDFSVSFWIRIPKYRNDDIQNYIHNEYTIINCMKNNSGWKISIRGNRIIWTLIDINGKTKSVFFEYNIREDISEYINRWFFVTITNNLDNAKIYINGTLESNMDIKDIGEVIVNGEITFKLDGDVDRTQFIWMKYFSIFNTQLNQSNIKEIYKIQSYSEYLKDFWGNPLMYNKEYYMFNAGNKNSYIKLVKDSSVGEILIRSKYNQNSNYINYRNLYIGEKFIIRRESNSQSINDDIVRKEDYIHLDLVLHHEEWRVYAYKYFKEQEEKLFLSIISDSNEFYKTIEIKEYDEQPSYSCQLLFKKDEESTDDIGLIGIHRFYESGVLRKKYKDYFCISKWYLKEVKRKPYKSNLGCNWQFIPKDEGWTE

SEQ ID NO: 218 - protein, 1293 aa, Artificial Sequence
  Synthetic
MPFVNKQFNYRDPVNGVDIAYIKIPNAGQMQPVKAFKIHNKIWVIPERDTFTNPEEGDLNPPPEAKQVPVSYYDSTYLSTDNEKDNYLKGVTKLFERIYSTDLGRMLLTSIVRGIPFWGGSTIDTELKVIDTNCINVIQPDGSYRSEELNLVIIGPSADIIQFECKSFGHEVLNLTRNGYGSTQYIRFSPDFTFGFEESLEVDTNPLLGAGKFATDPAVTLAHELIHAGHRLYGIAINPNRVFKVNTNAYYEMSGLEVSFEELRTFGGHDAKFIDSLQENEFRLYYYNRFRDIASTLNRAKSIVGTTASLQYMKNVFKEKYLLSEDTSGKFSVDRLRFDKLYRMLTEIYTEDNFVKFFKVLNRKTYLNFDKAVFRINIVPRVNYTIYDGFNLRNTNLAANFNGQNTEINNMNFTRLKNFTGLFEFYKLLCVRGIIPFTSLVPRGSALNDLCIKVNNWDLFFSPSEDNFTNDLNKGEEITSDTNIEAAEENISLDLIQQYYLTFNFDNEPENISIENLSSDIIGQLELMPNIERFPNGKKYELDKYTMFHYLRAQEFEHGKSRIALTNSVNEALLNPSRVYTFFSSDYVKKVNKATEAAMFLGWVEQLVYDFTDETSEVSTTDKIADITIIIPYIGPALNIGNMLYKDDFVGALIFSGAVILLEFIPEIAIPVLGTFALVSYIANKVLTVQTIDNALSKRNEKWDEVYKYIVTNWLAKVNTQIDLIRKKMKETLENQAEATKAIINYQYNQYTEEEKNNINFNIDDLSSKLNESINKAMININKFLNQCSVSYLMNSMIPYGVKRLEDFDASLKDALLKYIYDNRGTLIGQVDRLKDKVNNTLSTDIPFQLSKYVDNQRLLSTFTEYIKNIINTSILNLRYESNHLIDLSRYASKINIGSKVNFDPIDKNQIQLFNLESSKIEVILKNAIVYNSMYENFSTSFWIRIPKYFNSISLNNEYTIINCMENNSGWKVSLNYGEIIWTLQDTQEIKQRVVFKYSQMINISDYINRWIFVTITNNRLNNSKIYINGRLIDQKPISNLGNIHASNNIMFKLDGCRDTHRYIWIKYFNLFDKELNEKEIKDLYDNQSNSGILKDFWGDYLQYDKPYYMLNLYDPNKYVDVNNVGIRGYMYLKGPRGSVMTTNIYLNSSLYMGTKFIIKKYASGNKDNIVRNNDRVYINVVVKNKEYRLATNASQAGVEKILSALEIPDVGNLSQVVVMKSKNDQGITNKCKMNLQDNNGNDIGFIGFHQFNNIAKLVASNWYNRQIERSSRTLGCSWEFIPVDDGWGERPL

SEQ ID NO: 219 - protein, 1293 aa, Artificial Sequence
  Synthetic
MPFVNKQFNYRDPVNGVDIAYIKIPNAGQMQPVKAFKIHNKIWVIPERDTFTNPEEGDLNPPPEAKQVPVSYYDSTYLSTDNEKDNYLKGVTKLFERIYSTDLGRMLLTSIVRGIPFWGGSTIDTELKVIDTNCINVIQPDGSYRSEELNLVIIGPSADIIQFECKSFGHEVLNLTRNGYGSTQYIRFSPDFTFGFEESLEVDTNPLLGAGKFATDPAVTLAHELIHAGHRLYGIAINPNRVFKVNTNAYYEMSGLEVSFEELRTFGGHDAKFIDSLQENEFRLYYYNRFRDIASTLNRAKSIVGTTASLQYMKNVFKEKYLLSEDTSGKFSVDRLRFDKLYRMLTEIYTEDNFVKFFKVLNRKTYLNFDKAVFRINIVPRVNYTIYDGFNLRNTNLAANFNGQNTEINNMNFTRLKNFTGLFEFYKLLCVRGIIPFTSLVPRGSALNDLCIKVNNWDLFFSPSEDNFTNDLNKGEEITSDTNIEAAEENISLDLIQQYYLTFNFDNEPENISIENLSSDIIGQLELMPNIERFPNGKKYELDKYTMFHYLRAQEFEHGKSRIALTNSVNEALLNPSRVYTFFSSDYVKKVNKATEAAMFLGWVEQLVYDFTDETSEVSTTDKIADITIIIPYIGPALNIGNMLYKDDFVGALIFSGAVILLEFIPEIAIPVLGTFALVSYIANKVLTVQTIDNALSKRNEKWDEVYKYIVTNWLAKVNTQIDLIRKKMKETLENQAEATKAIINYQYNQYTEEEKNNINFNIDDLSSKLNESINKAMININKFLNQCSVSYLMNSMIPYGVKRLEDFDASLKDALLKYIYDNRGTLIGQVDRLKDKVNNTLSTDIPFQLSKYVDNQRLLSTFTEYIKNIINTSILNLRYESNHLIDLSRYASKINIGSKVNFDPIDKNQIQLFNLESSKIEVILKNAIVYNSMYENFSTSFWIRIPKYFNSISLNNEYTIINCMENNSGWKVSLNYGEIIWTLQDTQEIKQRVVFKYSQMINISDYINRWIFVTITNNRLNNSKIYINGRLIDQKPISNLGNIHASNNIMFKLDGCRDTHRYIWIKYFNLFDKELNEKEIKDLYDNQSNSGILKDFWGDYLQYDKPYYMLNLYDPNKYVDVNNVGIRGYMYLKGPRGSVMTTNIYLNSSLYRGTKFIIKKYASGNKDNIVRNNDRVYINVVVKNKEYRLATNASQAGVEKILSALEIPDVGNLSQVVVMKSKNDQGIRNKCKMNLQDNNGNDIGFIGFHQFNNIAKLVASNWYNRQIERSSRTLGCSWEFIPVDDGWGERPL

SEQ ID NO: 220 - protein, 425 aa, Clostridium botulinum
MPFVNKQFNYKDPVNGVDIAYIKIPNAGQMQPVKAFKIHNKIWVIPERDTFTNPEEGDLNPPPEAKQVPVSYYDSTYLSTDNEKDNYLKGVTKLFERIYSTDLGRMLLTSIVRGIPFWGGSTIDTELKVIDTNCINVIQPDGSYRSEELNLVIIGPSADIIQFECKSFGHEVLNLTRNGYGSTQYIRFSPDFTFGFEESLEVDTNPLLGAGKFATDPAVTLAHELIHAGHRLYGIAINPNRVFKVNTNAYYEMSGLEVSFEELRTFGGHDAKFIDSLQENEFRLYYYNKFKDIASTLNKAKSIVGTTASLQYMKNVFKEKYLLSEDTSGKFSVDKLKFDKLYKMLTEIYTEDNFVKFFKVLNRKTYLNFDKAVFKINIVPKVNYTIYDGFNLRNTNLAANFNGQNTEINNMNFTKLKNFTGLFEF

SEQ ID NO: 221 - protein, 425 aa, Clostridium botulinum
MPFVNKQFNYKDPVNGVDIAYIKIPNAGQMQPVKAFKIHNKIWVIPERDTFTNPEEGDLNPPPEAKQVPVSYYDSTYLSTDNEKDNYLKGVTKLFERIYSTDLGRMLLTSIVRGIPFWGGSTIDTELKVIDTNCINVIQPDGSYRSEELNLVIIGPSADIIQFECKSFGHDVLNLTRNGYGSTQYIRFSPDFTFGFEESLEVDTNPLLGAGKFATDPAVTLAHELIHAEHRLYGIAINPNRVFKVNTNAYYEMSGLEVSFEELRTFGGHDAKFIDSLQENEFRLYYYNKFKDVASTLNKAKSIIGTTASLQYMKNVFKEKYLLSEDTSGKFSVDKLKFDKLYKMLTEIYTEDNFVNFFKVLNRKTYLNFDKAVFRINIVPDENYTIKDGFNLKGANLSTNFNGQNTEINSRNFTRLKNFTGLFEF

SEQ ID NO: 222 - protein, 421 aa, Clostridium botulinum
MPFVNKQFNYRDPVNGVDIAYIKIPNAGQMQPVKAFKIHEGVWVIPERDTFTNPEEGDLNPPPEAKQVPVSYYDSTYLSTDNEKDNYLKGVIKLFDRIYSTGLGRMLLSFIVKGIPFWGGSTIDTELKVIDTNCINVIEPGGSYRSEELNLVITGPSADIIQFECKSFGHDVFNLTRNGYGSTQYIRFSPDFTFGFEESLEVDTNPLLGAGTFATDPAVTLAHELIHAAHRLYGIAINPNRVLKVKTNAYYEMSGLEVSFEELRTFGGNDTNFIDSLWQKKFSRDAYDNLQNIARILNEAKTIVGTTTPLQYMKNIFIRKYFLSEDASGKISVNKPAFKEFYRVLTRGFTELEFVNPFKVINRKTYLNFDKAVFRINIVPDENYTINEGFNLEGANSNGQNTEINSRNFTRLKNFTGLFEF

SEQ ID NO: 223 - protein, 425 aa, Clostridium botulinum
MPFVNKQFNYNDPENGVDIAYIKIPNAGKMQPVKAFKIHNKVWVIPERDIFTNPEEVDLNPPPEAKQVPISYYDSAYLSTDNEKDNYLKGVIKLFERIYSTDLGRMLLISIVRGIPFWGGGKIDTELKVIDTNCINIIQLDDSYRSEELNLAIIGPSANIIESQCSSFRDDVLNLTRNGYGSTQYIRFSPDFTVGFEESLEVDTNPLLGAGKFAQDPAVALAHELIHAEHRLYGIAINTNRVFKVNTNAYYEMAGLEVSLEELITFGGNDAKFIDSLQKKEFSLYYYNKFKDIASTLNKAKSIVGTTASLQYMKNVFKEKYLLSEDATGKFLVDRLKFDELYKLLTEIYTEDNFVKFFKVLNRKTYLNFDKAVFKINIVPDVNYTIHDGFNLRNTNLAANFNGQNIEINNKNFDKLKNFTGLFEF

SEQ ID NO: 224 - protein, 425 aa, Clostridium botulinum
MPFVNKQFNYKDPVNGVDIAYIKIPNAGQMQPVKAFKIHNKIWVIPERDTFTNPEEGDLNPPPEAKQVPVSYYDSTYLSTDNEKDNYLKGVTKLFERIYSTELGRMLLTSIVRGIPFWGGSTIDTELKVIDTNCINVIQPDGSYRSEELNLVIIGPSADIIQFECKSFGHDVLNLTRNGYGSTQYIRFSPDFTFGFEESLEVDTNPLLGAGKFATDPAVTLAHELIHAGHRLYGIAINPNRVFKVNTNAYYEMSGLEVSFEELRTFGEHDAKFIDSLQENEFRLYYYNKFKDIASTLNKAKSIVGTTASLQYMKNVFKEKYLLSEDTSGKFSVDKLKFDKLYKMLTEIYTEDNFVKFFKVLNRKTYLNFDKAVFKINIVPEVNYTIYDGFNLRNTNLAANFNGQNTEINNMNFTKLKNFTGLFEF

SEQ ID NO: 225 - protein, 425 aa, Clostridium botulinum
MPFVNKQFNYKDPVNGVDIAYIKIPNAGQMQPVKAFKIHNKIWVIPERDTFTNPEEGDLNPPPEAKQVPVSYYDSTYLSTDNEKDNYLKGVTKLFERIYSTDLGRMLLTSIVRGIPFWGGSTIDTELKVIDTNCINVIQPDGSYRSEELNLVIIGPSADIIQFECKSFGHEVLNLTRNGYGSTQYIRFSPDFTFGFEESLEVDTNPLLGAGKFATDPAVTLAHELIHAGHRLYGIAINPNRVFKVNTNAYYEMSGLEVSFEELRTFGGHDAKFIDSLQENEFRLYYYNKFKDIASTLNKAKSIVGTTASLQYMKNVFKEKYLLSEDTSGKFSVDKLKFDKLYKMLTEIYTEDNFVKFFKVLNRKTYLNFDKAVFKINIVPKVNYTIYDGFNLRNTNLAANFNGQNTEINNMNFAKLKNFTGLFEF

SEQ ID NO: 226 - protein, 425 aa, Clostridium botulinum
MPFVNKQFNYKDPVNGVDIAYIKIPNAGQMQPVKAFKIHNKIWVIPERDIFTNPEEGDLNPPPEAKQVPVSYYDSTYLSTDNEKDNYLKGVTKLFERIYSTDLGRMLLTSIVRGIPFWGGSTIDTELKVIDTNCINVIQPDGSYRSEELNLVIIGPSADIINFECKSFGHDVLNLTRNGYGSTQYIRFSPDFTFGFEESLEVDTNPLLGAGKFAIDPAVTLAHELIHAGHRLYGIAINPNRVFKVNTNAYYEMSGLEVSFEELRTFGGHDAKFIDSLQENEFRLYYYNKFKEVASILNKAKSIIGTTASLQYMKNVFKEKYLLSEDTSGKFSVDKLRFDKLYKMLTEIYTEDNFVKFFKVLNRKTYLNFDKAVFKMNIVPEVNYTIYDGFNLRNTNLAANFNGQNTEINNMNFTKLKNFTGLFEF

SEQ ID NO: 227 - protein, 425 aa, Clostridium botulinum
MPFVNKQFNYKDTVNGVDIAYIKIPNAGQMQPVKAFKIHNKIWVIPERDTFTNPKEGDLNPPPEAKQVPVSYYDSTYLSTDNEKDNYLKGVTKLFERIYSTDLGRMLLTSIVRGIPFWGGSTIDTELKVIDTNCINVIQPDGSYRSEELNLVIIGPSADIIQFECKSFGHDVLNLTRNGYGSTQYIRFSPDFTFGFEESLEVDTNPLLGAGKFATDPAVTLAHELIHAEHRLYGIAINPNRVFKVNTNAYYEMSGLEVSFEELRTFGGHNAKFIDSLQENEFRLYYYNKFKDIASTLNKAKSIVGTTASLQYMKNVFKEKYLLSEDTSGKFSVDKLKFDKLYKMLTEIYTEDNFVKFFKVLNRKTYLNFDKAVFKINIVPDENYTIKDGFNLKNTNLAANFNGQNTEINSRNFTKLKNFTGLFEF

What is claimed is:

1. A modified Clostridial Botulinum neurotoxin (BoNT) polypeptide comprising a modified protease domain of Clostridial Botulinum serotype A1 (BoNT/A1) comprising one or more arginine substitutions at positions corresponding to K11, K41, K212, K272, K289, K291, K299, K318, K335, K337, K340, K343, K356, K375, K381, Y387, M411 and K415 in SEQ ID NO: 1.

2. The modified BoNT polypeptide of claim 1, wherein the modified protease domain comprises one or more arginine substitutions at positions corresponding to K11, K335, K337, K343, K375, and K415 in SEQ ID NO: 1.

3. The modified BoNT polypeptide of claim 1, wherein the modified protease domain comprises one or more arginine substitutions at positions corresponding to K41, K318, and K340 in SEQ ID NO: 1.

4. The modified BoNT polypeptide of claim 1, wherein the modified protease domain comprises one or more arginine substitutions at positions corresponding to K289, K291, K299, and K381 in SEQ ID NO: 1.

5. The modified BoNT polypeptide of claim 1, wherein the modified protease domain comprises one or more arginine substitutions at positions corresponding to K212, K272, and K356 in SEQ ID NO: 1.

6. The modified BoNT polypeptide of claim 1, wherein the modified protease domain comprises one or more arginine substitutions at positions corresponding to K11, K41, K318, K335, K337, K340, K343, K375, and K415 in SEQ ID NO: 1.

7. The modified BoNT polypeptide of claim 1, wherein the modified protease domain comprises one or more arginine substitutions at positions corresponding to K11, K289, K291, K299, K335, K337, K343, K375, K381, and K415 in SEQ ID NO: 1.

8. The modified BoNT polypeptide of claim 7, wherein the modified protease domain comprises arginine substitutions at positions corresponding to K11, K289, K291, K299, K335, K337, K343, K375, K381, and K415 in SEQ ID NO: 1.

9. The modified BoNT polypeptide of claim 7 or claim 8, wherein the modified protease domain further comprises one or more arginine substitutions at positions corresponding to K41, K212, K272, K318, K340, and K356 in SEQ ID NO: 1.

10. The modified BoNT polypeptide of 1, wherein the modified protease domain comprises one or more arginine substitutions at positions corresponding to K11, K41, K289, K291, K299, K318, K335, K337, K340, K343, K375, K381, and K415 in SEQ ID NO: 1.

11. The modified BoNT polypeptide of 10, wherein the modified protease domain comprises arginine substitutions at positions corresponding to K11, K41, K289, K291, K299, K318, K335, K337, K340, K343, K375, K381 and K415 in SEQ ID NO: 1.

12. The modified BoNT polypeptide of 1, wherein the modified protease domain comprises one or more arginine substitutions at positions corresponding to K11, K41, K212, K289, K291, K299, K318, K335, K337, K340, K343, K356, K375, K381, and K415 in SEQ ID NO: 1.

13. The modified BoNT polypeptide of 12, wherein the modified protease domain comprises arginine substitutions at positions corresponding to K11, K41, K212, K289, K291, K299, K318, K335, K337, K340, K343, K356, K375, K381, and K415 in SEQ ID NO: 1.

14. The modified BoNT polypeptide of 1, wherein the modified protease domain comprises one or more arginine substitutions at positions corresponding to K11, K41, K212, K272, K289, K291, K299, K318, K335, K337, K340, K343, K356, K375, K381, and K415 in SEQ ID NO: 1.

15. The modified BoNT polypeptide of 1, wherein the modified protease domain comprises arginine substitutions at positions corresponding to K11, K41, K212, K272, K289, K291, K299, K318, K335, K337, K340, K343, K356, K375, K381, and K415 in SEQ ID NO: 1.

16. The modified BoNT polypeptide of any one of claims 1-15, wherein the modified protease domain comprises an arginine substitution of K11R in SEQ ID NO: 1.

17. The modified BoNT polypeptide of any one of claims 1-16, wherein the modified protease domain comprises an arginine substitution of K41R in SEQ ID NO: 1.

18. The modified BoNT polypeptide of any one of claims 1-17, wherein the modified protease domain comprises an arginine substitution of K212R in SEQ ID NO: 1.

19. The modified BoNT polypeptide of any one of claims 1-18, wherein the modified protease domain comprises an arginine substitution of K272R in SEQ ID NO: 1.

20. The modified BoNT polypeptide of any one of claims 1-19, wherein the modified protease domain comprises an arginine substitution of K289R in SEQ ID NO: 1.

21. The modified BoNT polypeptide of any one of claims 1-20, wherein the modified protease domain comprises an arginine substitution of K291R in SEQ ID NO: 1.

22. The modified BoNT polypeptide of any one of claims 1-21, wherein the modified protease domain comprises an arginine substitution of K299R in SEQ ID NO: 1.

23. The modified BoNT polypeptide of any one of claims 1-22, wherein the modified protease domain comprises an arginine substitution of K318R in SEQ ID NO: 1.

24. The modified BoNT polypeptide of any one of claims 1-23, wherein the modified protease domain comprises an arginine substitution of K335R in SEQ ID NO: 1.

25. The modified BoNT polypeptide of any one of claims 1-24, wherein the modified protease domain comprises an arginine substitution of K337R in SEQ ID NO: 1.

26. The modified BoNT polypeptide of any one of claims 1-25, wherein the modified protease domain comprises an arginine substitution of K340R in SEQ ID NO: 1.

27. The modified BoNT polypeptide of any one of claims 1-26, wherein the modified protease domain comprises an arginine substitution of K343R in SEQ ID NO: 1.

28. The modified BoNT polypeptide of any one of claims 1-27, wherein the modified protease domain comprises an arginine substitution of K356R in SEQ ID NO: 1.

29. The modified BoNT polypeptide of any one of claims 1-28, wherein the modified protease domain comprises an arginine substitution of K375R in SEQ ID NO: 1.

30. The modified BoNT polypeptide of any one of claims 1-29, wherein the modified protease domain comprises an arginine substitution of K381R in SEQ ID NO: 1.

31. The modified BoNT polypeptide of any one of claims 1-30, wherein the modified protease domain comprises an arginine substitution of Y387R in SEQ ID NO: 1.

32. The modified BoNT polypeptide of any one of claims 1-31, wherein the modified protease domain comprises an arginine substitution of M411R in SEQ ID NO: 1.

33. The modified BoNT polypeptide of any one of claims 1-32, wherein the modified protease domain comprises an arginine substitution of K415R in SEQ ID NO: 1.

34. The modified BoNT polypeptide of any one of claims 1-33, wherein the modified protease domain comprises an amino acid sequence that is at least 80% identical to the amino acid sequence of SEQ ID NO: 88-120, optionally wherein the modified protease binding domain comprises the amino acid sequence of any one of SEQ ID NOs: 88-120.

35. The modified BoNT polypeptide of any one of claims 1-34, further comprising a translocation domain from BoNT/A1.

36. The modified BoNT polypeptide of any one of claims 1-35, wherein the modified BoNT polypeptide comprises an amino acid sequence that is at least 80% identical to the amino acid sequence of SEQ ID NO: 45-77, optionally wherein the modified BoNT polypeptide comprises the amino acid sequence of any one of SEQ ID NOs: 45-77.

37. The modified BoNT polypeptide of claim 36, further comprising a receptor binding domain of BoNT/A1.

38. The modified BoNT polypeptide of claim 37, wherein the modified BoNT polypeptide comprises an amino acid sequence that is at least 80% identical to the amino acid sequence of any one of SEQ ID NOs: 2-34, optionally wherein the modified BoNT polypeptide comprises the amino acid sequence of any one of SEQ ID NOs: 2-34.

39. The modified BoNT polypeptide of claim 37, wherein the receptor binding domain of BoNT/A1 comprises one or more amino acid substitutions at positions corresponding to 917, 953, 954, 955, 957, 968, 1025, 1026, 1052, 1062, 1063, 1064, 1065, 1066, 1145, 1156, 1232, 1272, 1278, 1288, 1289, 1292, 1294, and 1295 in SEQ ID NO: 1, optionally wherein the one or more amino acid substitutions correspond to one or more of F917R or F917K; F953H or F953Y; N954S; S955K; S957N, S957Q or S957Y; M968I; N1025T; N1026K; N1052K; D1062E; T1063P; H1064R or H1064Q; R1065N; Y1066R or Y1066K; T1145Y; R1156M or R1156I; T1232R or T1232K; E1272G; L1278F, L1278Y or L1278W; D1288E or D1288N; D1289Y; G1292R or G1292K; R1294S or R1294T; and P1295S or P1295T in SEQ ID NO: 1.

40. The modified BoNT polypeptide of claim 39, wherein the receptor binding domain of BoNT/A1 comprises an amino acid substitution at a position corresponding to 1156 or 1232 in SEQ ID NO: 1, optionally wherein the amino acid substitution corresponds to R1156M or T1232R in SEQ ID NO: 1.

41. The modified BoNT polypeptide of claim 39 or claim 40, wherein the modified BoNT polypeptide comprises an amino acid sequence that is at least 80% identical to the amino acid sequence of any one of SEQ ID NOs: 131-165 fused to any one of SEQ ID NOs: 45-77.

42. The modified BoNT polypeptide of claim 41, wherein the modified BoNT polypeptide comprises an amino acid sequence that is at least 80% identical to the amino acid sequence of SEQ ID No: 177 or SEQ ID NO: 178, optionally wherein the modified BoNT polypeptide comprises the amino acid sequence of SEQ ID NO: 177 or SEQ ID NO: 178.

43. The modified BoNT polypeptide of claim 36, further comprising a receptor binding domain from BoNT/A2.

44. The modified BoNT polypeptide of claim 43, wherein the receptor binding domain comprises one or more amino acid substitutions at positions corresponding to 915, 923, 1090, 1103, 1117, 1156, 1170, 1227, 1254, 1255, or 1256 in SEQ ID NO: 35, optionally wherein the one or more amino acid substitutions correspond to one or more of K915Q, T923K, 51090N, N1103D, F1117Y, E1156M, E1170K, D1227N, L1254Q, Y1255G, or D1256N in SEQ ID NO: 35.

45. The modified BoNT polypeptide of claim 44, wherein the modified BoNT polypeptide comprises an amino acid sequence that is at least 80% identical to the amino acid sequence of SEQ ID NO: 166-176 or 204 fused to any one of SEQ ID NO: 45-77.

46. The modified BoNT polypeptide of claim 45, wherein the modified BoNT polypeptide comprises the amino acid sequence of SEQ ID NO: 166-176 or 204 fused to any one of SEQ ID NO: 45-77.

47. The modified BoNT polypeptide of any one of claims 1-35, further comprising a receptor binding domain from a second BoNT, optionally wherein the second BoNT is of serotype B, C, D, E, F, G, H, or En.

48. The modified BoNT polypeptide of claim 47, wherein the modified BoNT polypeptide comprises an amino acid sequence that is at least 80% identical to the amino acid sequence of any one of SEQ ID NO: 179-186 fused to any one of SEQ ID NO: 45-77.

49. The modified BoNT polypeptide of claim 47 or claim 48, wherein the modified BoNT polypeptide comprises the amino acid sequence of SEQ ID NO: 179-186 fused to any one of SEQ ID NO: 45-77.

50. The modified BoNT polypeptide of any one of claims 47-49, wherein the modified BoNT polypeptide comprises the amino acid sequence of SEQ ID NO: 203.

51. The modified BoNT polypeptide of any one of claims 35-50 further comprising a modified linker region.

52. The modified BoNT polypeptide of claim 51, wherein the modified linker region comprises a protease cleavage site.

53. The modified BoNT polypeptide of claim 52, wherein the protease cleavage site comprises the amino acid sequence of any one of SEQ ID NO: 206-212.

54. A modified Clostridial Botulinum neurotoxin (BoNT) polypeptide comprising a modified protease domain of Clostridial Botulinum serotype A2 (BoNT/A2) comprising one or more arginine substitutions at positions corresponding to K11, K289, K291, K299, K335, K337, and K343 in SEQ ID NO: 35.

55. A modified Clostridial Botulinum neurotoxin (BoNT) polypeptide of claim B1, wherein the modified protease domain of Clostridial Botulinum serotype A2 (BoNT/A2) comprises arginine substitutions at positions corresponding to K11, K289, K291, K299, K335, K337, and K343 in SEQ ID NO: 35.

56. The modified BoNT polypeptide of claim 54 or claim 55, wherein the modified protease domain comprises an arginine substitution of K11R in SEQ ID NO: 35.

57. The modified BoNT polypeptide of any one of claims 54-56, wherein the modified protease domain comprises an arginine substitution of K289R in SEQ ID NO: 35.

58. The modified BoNT polypeptide of any one of claims 54-57, wherein the modified protease domain comprises an arginine substitution of K291R in SEQ ID NO: 35.

59. The modified BoNT polypeptide of any one of claims 54-58, wherein the modified protease domain comprises an arginine substitution of K299R in SEQ ID NO: 35.

60. The modified BoNT polypeptide of any one of claims 54-59, wherein the modified protease domain comprises an arginine substitution of K335R in SEQ ID NO: 35.

61. The modified BoNT polypeptide of any one of claims 54-60, wherein the modified protease domain comprises an arginine substitution of K337R in SEQ ID NO: 35.

62. The modified BoNT polypeptide of any one of claims 54-61, wherein the modified protease domain comprises an arginine substitution of K343R in SEQ ID NO: 35.

63. The modified BoNT polypeptide of any one of claims 54-62, wherein the modified protease domain comprises an amino acid sequence that is at least 80% identical to the amino acid sequence of SEQ ID NO: 122-129. optionally wherein the modified protease binding domain comprises the amino acid sequence of any one of SEQ ID NOs: 122-129.

64. The modified BoNT polypeptide of any one of claims 54-63, further comprising a translocation domain from BoNT/A2.

65. The modified BoNT polypeptide of any one of claim 64, wherein the modified BoNT polypeptide comprises an amino acid sequence that is at least 80% identical to the amino acid sequence of SEQ ID NO: 79-86, optionally wherein the modified BoNT polypeptide comprises the amino acid sequence of any one of SEQ ID NOs: 79-86.

66. The modified BoNT polypeptide of claim 65, further comprising a receptor binding domain of BoNT/A1.

67. The modified BoNT polypeptide of claim 66, wherein the modified BoNT polypeptide comprises an amino acid sequence that is at least 80% identical to the amino acid sequence of any one of SEQ ID NOs: 36-43, optionally wherein the modified BoNT polypeptide comprises the amino acid sequence of any one of SEQ ID NOs: 36-43.

68. The modified BoNT polypeptide of claim 66, wherein the receptor binding domain of BoNT/A1 comprises one or more amino acid substitutions at positions corresponding to 917, 953, 954, 955, 957, 968, 1025, 1026, 1052, 1062, 1063, 1064, 1065, 1066, 1145, 1156, 1232, 1272, 1278, 1288, 1289, 1292, 1294, and 1295 in SEQ ID NO: 1, optionally wherein the one or more amino acid substitutions correspond to one or more of F917R or F917K; F953H or F953Y; N954S; S955K; S957N, S957Q or S957Y; M968I; N1025T; N1026K; N1052K; D1062E; T1063P; H1064R or H1064Q; R1065N; Y1066R or Y1066K; T1145Y; R1156M or R1156I; T1232R or T1232K; E1272G; L1278F, L1278Y or L1278W; D1288E or D1288N; D1289Y; G1292R or G1292K; R1294S or R1294T; and P1295S or P1295T in SEQ ID NO: 1.

69. The modified BoNT polypeptide of claim 68, wherein the receptor binding domain of BoNT/A1 comprises an amino acid substitution at a position corresponding to 1156 or 1232 in SEQ ID NO: 1, optionally wherein the amino acid substitution corresponds to R1156M or T1232R in SEQ ID NO: 1.

70. The modified BoNT polypeptide of claim 68 or claim 69, wherein the modified BoNT polypeptide comprises an amino acid sequence that is at least 80% identical to the amino acid sequence of any one of SEQ ID NOs: 131-165 or 205 fused to any one of SEQ ID NOs: 79-86, optionally wherein the modified BoNT polypeptide comprises an amino acid sequence of any one of SEQ ID NOs: 131-165 or 205 fused to any one of SEQ ID NOs: 79-86.

71. The modified BoNT polypeptide of claim 65, further comprising a receptor binding domain from BoNT/A2.

72. The modified BoNT polypeptide of claim 71, wherein the receptor binding domain comprises one or more amino acid substitutions at positions corresponding to 915, 923, 1090, 1103, 1117, 1156, 1170, 1227, 1254, 1255, or 1256 in SEQ ID NO: 35, optionally wherein one or more the amino acid substitutions corresponds to one or more of K915Q, T923K, 51090N, N1103D, F1117Y, E1156M, E1170K, D1227N, L1254Q, Y1255G, or D1256N in SEQ ID NO: 35.

73. The modified BoNT polypeptide of claim 72, wherein the modified BoNT polypeptide comprises an amino acid sequence that is at least 80% identical to the amino acid sequence of SEQ ID NO: 166-176 fused to any one of SEQ ID NO: 79-86, optionally wherein the modified BoNT polypeptide comprises the amino acid sequence of any one of SEQ ID NO: 166-176 fused to any one of SEQ ID NO: 79-86.

74. The modified BoNT polypeptide of any one of claims 54-73, further comprising a receptor binding domain from a second BoNT, optionally wherein the second BoNT is of serotype B, C, D, E, F, G, H, or En.

75. The modified BoNT polypeptide of claim 74, wherein the modified BoNT polypeptide comprises an amino acid sequence that is at least 80% identical to the amino acid sequence of any one of SEQ ID NO: 179-186 fused to any one of SEQ ID NO: 79-86.

76. The modified BoNT polypeptide of claim 75, wherein the modified BoNT polypeptide comprises the amino acid sequence of any one of SEQ ID NO: 179-186 fused to any one of SEQ ID NO: 79-86.

77. The modified BoNT polypeptide of any one of claims 64-76 further comprising a modified linker region.

78. The modified BoNT polypeptide of claim 77, wherein the modified linker region comprises a protease cleavage site.

79. The modified BoNT polypeptide of claim 78, wherein the protease cleavage site comprises the amino acid sequence of any one of SEQ ID NO: 206-212.

80. A nucleic acid molecule comprising a polynucleotide encoding a modified BoNT polypeptide of any one of claims 1-76.

81. A nucleic acid vector comprising the nucleic acid molecule of claim 80.

82. A cell comprising the nucleic acid molecule of claim 80 or the nucleic acid vector of claim 81.

83. A cell expressing the modified BoNT polypeptide of any one of claims 1-76.

84. A method of producing a modified BoNT polypeptide, the method comprising the steps of culturing the cell of claim 82 or claim 83 under conditions wherein the modified BoNT polypeptide is produced.

85. The method of claim 84, further comprising recovering the modified BoNT polypeptide from the culture.

86. A pharmaceutical composition comprising the modified BoNT polypeptide of any one of claims 1-76.

87. The pharmaceutical composition of claim 86, further comprising a pharmaceutically acceptable excipient.

88. A kit comprising a pharmaceutical composition of claim 86 or claim 87 and directions for therapeutic administration of the pharmaceutical composition.

89. A method of treating a condition, the method comprising administering a therapeutically effective amount of the modified BoNT polypeptide of any one of claims 1-76, or the pharmaceutical composition of or claim D1 or D2 to a subject to treat the condition.

90. The method of claim 89, wherein the condition is associated with overactive neurons or glands.

91. The method of claim 90, wherein the condition is selected from the group consisting of:
spasmodic dysphonia, spasmodic torticollis, laryngeal dystonia, oromandibular dysphonia, lingual dystonia, cervical dystonia, focal hand dystonia, blepharospasm, strabismus, hemifacial spasm, eyelid disorder, cerebral palsy, focal spasticity and other voice disorders, spasmodic colitis, neurogenic bladder, anismus, limb spasticity, tics, tremors, bruxism, anal fissure, achalasia, dysphagia and other muscle tone disorders and other disorders characterized by involuntary movements of muscle groups, lacrimation, hyperhydrosis, excessive salivation, excessive gastrointestinal secretions, secretory disorders, pain from muscle spasms, headache pain, dermatological or aesthetic/cosmetic conditions, obesity/reduced appetite, depression.

92. The method of claim 89 or 90, wherein the condition is not associated with unwanted neuronal activity.

93. The method of claim 92, wherein the condition is selected from the group consisting of: psoriasis, allergy, haemophagocytic lymphohistiocytosis, and alcoholic pancreatic disease.

94. The method of any one of any one of claims 89-93, wherein the administering is via injection to where unwanted neuronal activity is present.

95. The modified BoNT polypeptide of any one of claims 1-76 or the pharmaceutical composition of claim D1 or D2, for use in treating a condition associated with unwanted neuronal activity.

96. The modified BoNT polypeptide of any one of claims 1-76, or the pharmaceutical composition of claim 86 or 87, for use in medicine.

97. The modified BoNT polypeptide of any one of claims 1-76, or the pharmaceutical composition of claim 86 or 87, for cosmetic use.
